United States Patent Application Publication US 2015/0086982 A1 - sequence listing, part 7

SEQ ID NO: 105 - DNA, 6387817 bp, Penicillium chrysogenum (residues 4,258,547-6,387,817 of 6,387,817)
  misc_feature (318994)..(319093): n is a, c, g, or t
  misc_feature (839421)..(839520): n is a, c, g, or t
  misc_feature (1326322)..(1326421): n is a, c, g, or t
  misc_feature (1326487)..(1326487): n is a, c, g, or t
  misc_feature (1326497)..(1326497): n is a, c, g, or t
  misc_feature (1382022)..(1382122): n is a, c, g, or t
  misc_feature (1399022)..(1399022): n is a, c, g, or t
  misc_feature (1471213)..(1471312): n is a, c, g, or t
  misc_feature (1769206)..(1769305): n is a, c, g, or t
  misc_feature (1939758)..(1939758): n is a, c, g, or t
  misc_feature (2142833)..(2142932): n is a, c, g, or t
  misc_feature (2145333)..(2145432): n is a, c, g, or t
  misc_feature (2203432)..(2203531): n is a, c, g, or t
  misc_feature (2255880)..(2255979): n is a, c, g, or t
  misc_feature (2262936)..(2263035): n is a, c, g, or t
  misc_feature (2346003)..(2346102): n is a, c, g, or t
  misc_feature (2451830)..(2451929): n is a, c, g, or t
  misc_feature (2470453)..(2470552): n is a, c, g, or t
  misc_feature (2477531)..(2477630): n is a, c, g, or t
  misc_feature (2483600)..(2483600): n is a, c, g, or t
  misc_feature (2605454)..(2605454): n is a, c, g, or t
  misc_feature (2605456)..(2605458): n is a, c, g, or t
  misc_feature (2618748)..(2618748): n is a, c, g, or t
  misc_feature (2747253)..(2747352): n is a, c, g, or t
  misc_feature (2772340)..(2772340): n is a, c, g, or t
  misc_feature (2786947)..(2787046): n is a, c, g, or t
  misc_feature (3008140)..(3008239): n is a, c, g, or t
  misc_feature (3042933)..(3043032): n is a, c, g, or t
  misc_feature (3053688)..(3053787): n is a, c, g, or t
  misc_feature (3646324)..(3646423): n is a, c, g, or t
  misc_feature (3688494)..(3688593): n is a, c, g, or t
  misc_feature (4078647)..(4078647): n is a, c, g, or t
  misc_feature (4424652)..(4424751): n is a, c, g, or t
  misc_feature (5594475)..(5594476): n is a, c, g, or t
  misc_feature (5695259)..(5695358): n is a, c, g, or t
  misc_feature (5800528)..(5800528): n is a, c, g, or t
  misc_feature (5804161)..(5804260): n is a, c, g, or t
  misc_feature (5962328)..(5962427): n is a, c, g, or t
  misc_feature (6113477)..(6113576): n is a, c, g, or t
  misc_feature (6114175)..(6114175): n is a, c, g, or t
  misc_feature (6114285)..(6114285): n is a, c, g, or t
  misc_feature (6114299)..(6114299): n is a, c, g, or t
  misc_feature (6114988)..(6114988): n is a, c, g, or t
  misc_feature (6115074)..(6115074): n is a, c, g, or t
  misc_feature (6115439)..(6115439): n is a, c, g, or t
  misc_feature (6115658)..(6115658): n is a, c, g, or t
  misc_feature (6144932)..(6145031): n is a, c, g, or t
  misc_feature (6263926)..(6263926): n is a, c, g, or t
  misc_feature (6264199)..(6264199): n is a, c, g, or t
  misc_feature (6264346)..(6264346): n is a, c, g, or t
  misc_feature (6264768)..(6264768): n is a, c, g, or t
  misc_feature (6266765)..(6266765): n is a, c, g, or t
  misc_feature (6266905)..(6266905): n is a, c, g, or t
  misc_feature (6267135)..(6267135): n is a, c, g, or t
  misc_feature (6267179)..(6267179): n is a, c, g, or t
  misc_feature (6267283)..(6267283): n is a, c, g, or t
  misc_feature (6268806)..(6268905): n is a, c, g, or t
  misc_feature (6277981)..(6278080): n is a, c, g, or t
  misc_feature (6284799)..(6284799): n is a, c, g, or t
  misc_feature (6284818)..(6284818): n is a, c, g, or t
  misc_feature (6284841)..(6284841): n is a, c, g, or t
  misc_feature (6284861)..(6284861): n is a, c, g, or t
  misc_feature (6284916)..(6284916): n is a, c, g, or t
  misc_feature (6285286)..(6285286): n is a, c, g, or t
  misc_feature (6285538)..(6285538): n is a, c, g, or t
  misc_feature (6285540)..(6285540): n is a, c, g, or t
  misc_feature (6285546)..(6285547): n is a, c, g, or t
  misc_feature (6285585)..(6285585): n is a, c, g, or t
  misc_feature (6285663)..(6285663): n is a, c, g, or t
  misc_feature (6285677)..(6285677): n is a, c, g, or t
  misc_feature (6285692)..(6285692): n is a, c, g, or t
  misc_feature (6285700)..(6285700): n is a, c, g, or t
  misc_feature (6285718)..(6285718): n is a, c, g, or t
  misc_feature (6285743)..(6285743): n is a, c, g, or t
  misc_feature (6285781)..(6285781): n is a, c, g, or t
  misc_feature (6291855)..(6291855): n is a, c, g, or t
  misc_feature (6291881)..(6291881): n is a, c, g, or t
  misc_feature (6292296)..(6292297): n is a, c, g, or t
  misc_feature (6292602)..(6292602): n is a, c, g, or t
  misc_feature (6292668)..(6292668): n is a, c, g, or t
  misc_feature (6292802)..(6292802): n is a, c, g, or t
  misc_feature (6292831)..(6292831): n is a, c, g, or t
  misc_feature (6292883)..(6292883): n is a, c, g, or t
gaccgctgtggatgtttgcatgggtgcaattgtggtcggaggcgttgggttgagatgctgcggtaggttgaagaggaagagagggttgcgcgtgtaaagtgaagaattgctgctactcgaggtggaggcattctatatttagagagggtgacattgaaataaacagaaaaataatagcataggtaggaggtgggtggaggggttggaagaggtagagggagagagagggagaaacggaagaagagcggaggtgaagatcggagtggcgtcactgcggttcgacgctgatcgtacaacgacaccacgtattcaatactggctattggcagattctagaggatgaaatcactccattttatctcgttcgtctattgaaatagcaacatttaatacaacttacaactataggcacgtgggcagttacaattcccatagctccctggagctgatgatcagattagataagagatatcaacctccagggctaggtaggtcacctacgctattaaccctttgatccaatgagaaccctccttcaccagcttgggataccaaaggatccacatagcgtgttaaggttccttttgtgatagaggttgcgagtgctcttcatgagcttggactcggtgatccacgtctcattgaagctggtggaattgttggtgaaagaggctgggctgcggcattcgctcttgaagcctccgggatagctatggggactcagtccctaggagccgatgagacttccattcttgactcttccgaagtgcaagatttggggcacttgatggaggggtggcaagatcgagagttttgacgagacctagagacctaatttcggcaaaatctcgcgatggtcatacctggggaatgtgggtatatgaacggtataaaagtggtcttactggtttcatctacgctccagatgctgagaatgttaatgtcaaggggatgggaagtatgccttgggcgcttagggaatcataatgaaagaaatatggcgtagcctagcagtgaaaaccaatcctattgtgcaagttcgaccctccggtctaaagtagtacctaagttatctgcgcctccgcctcttgcttattcttatgtttcggatttgcatcgatttccaacggcgcttacggcgctgggcgagagactcccgttatgtcaagaacttcactaacgaaacaaagtagcccctaaattgacatttatattgatgatgtcgtattttcatagtcgtggacaattgcttacttatctattctactcttgaaaagccgattgcacgaaaagcattgtcttgagcgcttaagagaaacttcaactggctcttgttgttatcttcaagtggacgcgacacactgaagatgaagccaaagctttctttggcagcttaagatataaaataaccggggctctgtgcctgcacgtatgtctttgtactcgctagtatccataaatagacaatgaaacgccgaagtctcctttgtaatgtatagtgttattgttatactctttgaaactaaatagatctctggatcaaagagctacgcatgaggaacacggcgctgacttgaaacactggtcttattcaacataaaacacgatacaaagcagattcccggagagcctgtataaatgctccccctaagtagccgcgagctatcagaattaaacggctcaacccaaagtgacacactgacttgattcattcttcttttccccacgcatccctttctcaacaatcaaactgtatcgaaaacatgccgactctctcagaatttcctaacgagctgctactggagatctccctccgccttgactatcctggcctcaatgcattcacacgggtctgccgccacttccatgctttgtcaaatagggtgctttatagaaccatcgccaaagactctcctgggaaagcgatagcatgggcaactaaaaaagagaaggaaaccagtgcgcggaaactgctgcagatgtgcggtatgaagatattggacgatattgtctttggacgagaaccaatagtgatcgccgcatcgaatggacacactcatcttgttgaattattcctgcctcactgcattcaccacgacaccgaaaaaggaggagatctatacaaaaaagcgcttactaaggcaattgaaaaagagcatgttgaggtcgtcaaactacttctcgaacacaagacccacaccaacagccaggacagatatgctgcaattcctttatgcagagcagtcagaatgcgacatgtaccaattgtgaggcttttacttgaacacaattactgcaacctcgatgcatatgacatgtatgacatgacgcctctagccctagctgcagcagcgaaagcatcatctacaaatctggaaatcgccaaactcttggtagaggctggcgcagactcgcatatagaacacgggctgttactcagagccgcgaaatcatacaacctccccgtcatgaagctcttactagcgaataacttcgattggcggcgactagagtggttcgatgtcttgcgtgaattctctcgaccaataccggaaaactacgaggtgggggaattactactaagcgggatgaatgtggatcgcatactgagttatggtaacgctcaacgctgctttctgttgaggggagcgattgccaatcatctcgatgatctgctagaaaagatactgaatgagtggcctgtcctcgatgaaaaccataagccaagccggagggcaatccgtttctgtcctctgagtctggctgtctgcaatggccgacctagcgccgtcaagctcttactcgagcatggcgctgaccctggtggtgaacttgactgtccaccggtacaatttgctcttgaacaaggaaaggatgcaatggcaaagctactatttgacaaaggagcgacatttgacccggaaacgtgtcatgagtcgtccggataccgtcgattactgaagctccgtatggctcgagtgcagagagtggcctattaataaagacctatagttatctacatgatatggagattgtatattgtatcgaaacacaaacttacttgtttacattttatacacacctaaggctatagaattcttactttccttcgtacatctacctcgtagtttggcttaatggctaattttgctgtgttagctcagatagacatcgacctagctagattcaagcccaagtcctatttaacaagcgacttggatgcggagagcccgatacatgacaatatagctattcttagtaggtaatatcacgctttaccctaccactcctacttccttttcttataacttcagaagggaaaaataacagactgttgttttggagtagctccggtacgcggacgcggacatctgcggacaaagacattatgtgaaaccctgctagcttctccataattgctggcggacctcacatttgtgagccaatactacttgggtacgcagaacccacttagtctaatgagagacgcggtctatgccgccaaatcttatttgcgctttttctggctagagatcgacgccgcggttttcggcagtcgagcaccatgccccgctgcgtttgggagtggagatcattcaccctagcgttctatcttggccaaacatatcttagagcctaaatttggtttctccaatgcagtatacggtctttctaatcacaatctcctgatggcaactatatagacgctatggcggtggcgatccatggtccgccattgtgctcccagtcggttttggaaagatagacgtatagggcaaaaagagagattggatctacaacatagtacttacaaggaaaaacaccccatatggtggagcatcagatgcagtgcagtccgcttaaacctaattcaggagcagtaccctagggaatcccattcttatagccattctcatacaaacatgatccctccttctgcagaggattttcaagatcccctcacagagttcctggagccctgaatcatggttctactcacccatgtcttgcgttccctatacgctgatggcggcgaggactctatcgcccaccgctgggagttccaggaggagagtccccttcgaggtgtcgaccggtcgctctttattgctatgggaatccttgctctctgctcattatgttccactctgggtctactgtcgttccttacttatcgattcatctactggcagcggtactacaaaaactcgcttgcgcagaaccaatatgtcgttctcatttacaatctattgctgatcgatctacaacaggctatcgcttttacgatcagtctatattgggtggcccggggcagtattcactctggtgaagtggcctgctatttgcagggctggtggattcaaacagcagatcccggtagtggtctgtttgtcttgtctattgctctgcacacaggctttgtcgtcttgcgtggtcggcagctgcctttcaatatcttcgtatcctgtgtggttggtttgtggatgttcattcttcttttgggattcattccggtcggcctctatggatccaacgtctttgtcatttccgaagccaactgggtctgtctccgttcctgtgatgataggatggcgatgatgaatttgactaacttaatagtatagtgctggttgagtccacaatacgaagatgagcgcctctggggccactatatctggatcttcctctccgagtttggcaccattgttctctacacgatcatgttcttctacctccgacgtcgtatgcaacaagcgaccatgctccgccgtggccagcaggacagtctgcgtcgattgaaccgtgtcgtcatctacatggttatctaccccttggtgtacctgattctgtccttgcccctcgcagcgggtcgtatggccactgcgcgaggcgactctcccagcaaggcctacttcggtgtcgctggttgtctgatggctttttccggtgctatggatgtggttgtctacactctgacccgtcgtcacctgctcctcgataccgagcacagcaccactgaccatagctacggcaacaccgactcccaatggcaaacgaatatcaccaccaatgctggctcccggtctcgaaaggccttccggataggatctcgtctgaactcgaaaatgcgccgcagcgtgcccgacaaagaccacaccagtcccttcgaaggctccaccgaggacatcgttgggaagaatgatatggagatgtcgaacctccacggtgtgtaccaggagaccacgattgagatttctcatgagccagtctctgtcatagagtcggaggagaggagcgcgcgtcgcagcggctaagacttttggatatgtcgcatgccttattctgtatattatattgttgtacttacttctcaggcaccccttgccacaggatatctttctctcattatccgatatatttaatgatctgcagtatcccgcttctgtagaactagacgagacgataccatagatctgcgaactgtcaggattccctgatcgatcttacggacacacccattaggagacccgaagaccgacagcaaaattccgctaattgcacagaattttcccaggccagagttgttcaacgcagtcagatccgaaaaaacatgtggagtagcacaatttacagatttatgcgagccaagagccaagctagggccgggcccgcaaggcttctttttcttaaccgttgcttcttttcagtctggagttagaaaaagaaaagttatacatctcttactttttcccttcaaccatctgaatgataactcacgttatgtcttatggatacgtaggattaaccataaatctcctccatcagtggaaaactgtcgccgagtatccgttatgatatcgttggaccacttcccggcgtattcgaaattttctcgaactataactcagtggatacaggcgaaaaaacataggcaactataaaaaaaaatcaaaataaacaaacttataggacatgggtaaagaaatccaatcttttcccgcatatgggaatacactagactcgctgagtcgatcggaagaactctttgccgttgaagcgtacggtggtaaaagctagttcagtccatcaggatattcaggagactgtggatgggtctccgactaatcatgtccctcggaggtagtcccaaatgtgcaatggtcgctgcttagccgagccggtggaggtgagtctttctagcgcctgggctagaatctgtcggaaaaagccgtcatctcctatgttgtagaaaagggatctggattgtgtgttcggcccaacttggtatgttgtagatcctcatctccgcagatgactctgacccacattcccgatttgattccctatttgaatagctccgtagaagatgataggatggaagtgaagcaattggcacctttcaccattgccgggcgaaatgaaaaagaacatggaaaaggagaaagaaaggaaaaaccactctgaacatttcgccagtccgttggataagccagaataacaccgggacaaccctaaacatgtgaaagaggtccaataactccaacatggctcgaggagaatgccccagggaatcgaattgaactataaccggccaaataacacgttcctagctagactaatgtaccctaaaaatttacacataaccttttaagcatctagagttctcgattatagctccccgggcatatcgtcattaaagcttgcggccattgttgagacctcaacgactcgagtgctttgagcgggccaggattgggagtggaaaaagagtacggaacatgaacatcttaaataaattgacgctgattagggccatcaaaaagtagttcagcaatgaatagtattgttaggccgagtgctcactaaatgcctctagccaaactccgagtaccgaatacggagcaatcagtgagcagcccaatcaccgtgactgactctgagcaccatcataaaagcggcggcagctataatagggaagccccggcagaggaaatcaaatatgtatagtgacctaggtactcaattctctattcgctcgcagggtaagccttgcgccaatagtaattccagagtgtcctttgtatggctaaagagggcatggccttccacccagtgatgttatgattagcgccagaaggagccatcgctgccaatatatgagacctgatggtactgatcggaacgtcttgaccaacatatttcagcagcatcttaaccgttccgatatcatttttccacgaagccacggccaaggcagaccctgaacttccgttgcaaaagagaggatcggccgcggtcagtaacattgaatctacatagtagctcatattgctcttcgcccgtgtcgctcttagcaattttcttgatggaatattctgtatccctaacaatgtttctggctactcccgagaccgtgaagagcaaaggcgtgtaattgtgaaagctgactggctggtcgagccgtgccccgcgttctagcaaaagattaactgcagcttgcgcggcatcgcgatctttagcctgagctgcgagacagaggagtgtacaacctctatcttcttcatcgagttcgaatcgtgatccgagtttggcttgcgcatccggattaaaacccgcatctaagaacatattcaagataggcgcattagctagcatagcagcatatgtaaatacgcgggaatgtccaatgcgatccggttgtagttctactcctcgctggaggagtaacctgaagacggcttctcctcctaataccgcgagctggattgataggccgtcatctgaaaacgaaatatcttcaatcgacggaccagaagtctcaaacagcatttggaggatttccactttccccagatagagtgctctgttgaaaaggtccttcccatgctgtgatgcaaatacaacatcaaagcccttgttaatgatgtactttacgacatcatcatggcctcggtcaagcgcgagaatcatcgaagaggggcaatcattgggatcccagcccccatatatgtcactctcaataaggattgcgggataagtcacggcgtgataaagagattcgccatgatagagcaacaactctatcattctgatattgccagatgcaacggccagagccatgatatttctatggccatggtcgcaattccagttgctaaggacagacgtcctcgttgataatagtctctccagcaaatcctcgaggccgccagctacagcaaaacacagaagtttcgaccgtgcatctggaccaaaattgattgtgtggtccaaatcaatcttctttaggaggagtgacgccaatctcttatgccgtccgtctattttaacgaccatatccagaataagttcggtatcaaaaacatagcgttcgaagacgtaattgacgaacggctcattgccggtttccaaggcaagatcgaatggcgattgcgaccaactggtgtatgtggggtcagccccagcatcgactaaaagacggactatttccatagtcgtgcttgtagctggagctggagcaacataatgcaaagtgtggttgcgaccacacataatattaggatcacagcctcctgcaagcagaagtttgatgataggaatatgcctctgcctaaccgccaagcataatgataagtcacaccactttcttttctcccagggttccatacagcgtttgataaatccacgctcaattaaaaggctgacaactgaggcatgcccctctagtacagcgacggacaatgggtttccgaaaatgacgaggttatcaagattagagggcggaaacgaaatgagccctccgtcattgatcgctagagtcgggtctcttccatggtcgaggaacattcggacaatatctacatgaccgttctttgcagctattgtcataggatcattcctctgtcggatccagcctgaatctccaaacaacgcacctgcgtctagcagcttgcgaacacatactttcttcccattcgctgcggcccacgccagaggttggagggactgctctgtcttgagcaattcgtcgactctttcttttaacaaaccaaacagaagaggatgacattgatagagagagccgagatcggaaacaaattctagataagaagttacctctagtagcagttcaaaggggagttgaagtagcgacatggcttaacagtcgacaacgacgataacgggagatgaggaataatttcagtattcgatgagagtatttatcgcaggaagcctataaaaggactcatgcataagcttcaaggttgtcatgatgagggcaacttgtcatagtccgtgtcaagaataggtctagtctacgaggtagtaactgggcagtccgctgccaagcaaatctccaggaatcgcccttatcttatcagcaaaaatctttccccgacatccgacattcccctcttttgcctttgaacgcacttgtttaattgccacattcaatatggcagctcagactacagagaagttagatcagctggactgtaagaatctcagatttttggattgcctctcccaggtgtgactgattagataccagtgaacgtccaagccgccccgacggcagaccaagttcccgctgaagcggaggaggactcggacgacgcccaagacgagggtgccgcagaggctggagctgctggaggtaagctttgttgaggtttctttctcgtgaccgcgcctccaggaccccacctcaccccacagaaatcgaccgaattgaactaacagcggggtcaactctagccgacaaaaagaagaaaaagaagaagcctaagaagaagagcaagaagaagggcggtgccaaggttcagagcgagccaccgcgcgtccccgtgtctaacctcttccccaacggccagtaccccgagggtgagatcgtcgaatacctaaacgacaatgcctaccgtaccaccaacgaagagaaacgatacctcgatcgcatgaacaatgacttcctgcaggagtaccgccagggtgctgaagttcaccgtcaagtccgccagtatgcgcagaagaacatcaagcccggccagactttgactgagatcgcggaaggtatcgaggattcagtgcgcgctctgacaggtcactcgggtctggaggaaggtgataacatcaagggtggcatgggcttcccttgcggtttgagcatcaaccattgcgctgcgcattataccccgaacgccggcaacaagatggtcctgaacgagggagacgtgatgaaggtcgacttcggtgcgcaccttaacggccgcattgtggacagtgctttcaccatgacctttgaccccgtgtacgatcctcttctcgccgccgtgaaggacgccaccaacactggtatccgggtaagttcgcctttagctttacctttttctcaagcagagctgacgggtttctaggaagcgggaattgacgtccgtatgagtgatatcggtgccgccattcaagaagctatggagagttacgaagttgagatcaatggcacgatgcaccccgtcaagtgtatccgcaacttgaacggtcataacattgaccagcacgttatccacggcggcaagagtgtgcctatcgtcaagagcaccgatcagaccaagatggaagagggtgaagtttttgctattgagactttcggtagtactggaaaaggctacgtgcgggaggaagtaagtttatactgtcactggacggagaaccgaaactaacatggtcccagatggaaacctcgcactacgctctcgccgctgatgctcctaacgttcccctgcgtctttcctccgctaagaacttgttgaatttgatcaacaagaacttcggcacccttcccttctgtcgccggtatattgaccgcctcggtcaggacaagtacctcctgggcgtaagttaacgatgcagctcacacgtgagacactgaagctgacgaatgtagttgaacaacctggtttcatctggaattgtccaggattaccctcctctttgcgatatcaagggctcatacactgcccaatatgaacatgtatgtttctattttggggtgttctccactttgattgtttactgacttgttcttttagacaattgtgttgcgcccgaatgtgaaggaggttattagccgtggcgacgactactgatttattccatagaccgtatatactaaaagcatctgaaagatccatcccattagtaatgtcttaaatagattggagagtcggagagtcccttgacatcaaaacgccgatcctgccaagcctcaagccatcaaggatgccgtgtcgccccacgtggaacaacagtcttccgactttttaaggcctctcctatccctcatggcctaaacttcgacacataccaatttcgcatcatgtctgcggtcgttgaaacaagttcaccgcacctccgggtgtcggcagccaaaacatccgaccaaacgcaaccagagtccaccagaatccaggcaccggatgctttggtcgacgaccatttcttctggacgtacactgaagaaccccatcgctcaagacgacaggcaattatcaaggcccatccggaggtacgtgaccctgttttgctggccctcatggtggtacgggggttcgatgaagattccatgcggagttcccggatacatctggccactttactgggcgacggacagcctcaacgaatgcaattgcaatgctgattcatgatattatggtctataggtcaccaagctatgtggccccgagcctcttaccaaatgggtcgtcctcggcgtcgtgtccctacaaatcacctgtgcctatctccttcgcaacacctcaatgctcgattggcggttcctggccacggcatatgtgatcggtgcgacttgcaaccagaatctgttcctcgctattcacgagatctcacacaacctggcattccggtccgctttcgccaaccgattgcttgccatattcgcaaacctccctatcggactgccctacagcgcagcattcagagtacgtatactattccagaaaccacaaactagcagaaacccaggagaagccatgaattgacaaaagaccaacagccataccacctaacacaccacaaatccctcggcgtaacaggcctcgacaccgacctccccacagcagtggaagccttcttcctaaactccctcctgggcaagacattcttctgcaccttccagattctcttctacgccgtgcgcccaatgttcatctacagcccacccttcacctacatccacctcctgaacctaggtgtccaaataagcttcgactacgccctcagccaactatgcggcaccatgcaaccagtactatatttcctgctgagctcattcctcgccggatccctgcacccctgcgcaggccacttcatcgccgagcactacttcttctcgaacgtgaagagcggcggcacagagtccctagcagagctgaagaagaacgagaagtccgagaccccgcacccgctcgactcccttcctcccccggagacatactcgtactacggcccactcaatatcctcacttacaacgtcggcttgcataacgagcaccacgatttccctgctatcccatggaccagattgcataagctgcatgagattgcgcgcgagttctacgagccgctgccttgtcaccggagctgggtctgggttatttacactttcatcttggataaggatgttggtccttggtgtcgtgtgaagcgtgaacagggtggacggattgttggtggtgggtcgaagcgcggtggtgattctgctgcgtctaagcaatggaatggacgtggtggtgagggtatctcggctgcgtcggcgggtccggcgggcgaggagggtgatgggtggaaggagagtgagattcaatgttagatcttgttcggccttttgactataacgtctggtatggaattttcagttgttcgattacatacattactgggtggagtactggtgcttgttagatatatctgttttcaataagaataggctgtcattttgcggtttttatgaggcttcaaacgtgtgcgcgtagggagcacgaagtattgatctcggtagagtcgctctcagccaaaatgctgtccggtccctgtgtctgcaagaggatcgaatgtctgcgactaactaattaccgaaggagggagacgtagtccccaactatgtacgacatggacttagctctagtagcgaccacatggattatcccgagctcgagaataggtttatgaaacaaagagaaatgaatcgagagggctaggtccgttcatcataaaatgatattagacaagacaggaagggtaaagaaacaaaggaaataaacaacaaagaggatgagacagacagatgtctggcctctatggaagttcggacatccgagagaaaacatgaaaagagtatcgatactggggcaaaaaaaatcaaagcaaacgcagaaaaaaggctgatgctagaacagatagaaaaaggcatgctcttcaagagacagaactagatgggaatttgggagaggcgtcagcgacgttagaccagaggcattgagcacacgcatagtacgcgcaatgaagctagatagaccgtgagaaagcgacaaacagaagaccagcttagaagaagaagtacgcgatcaagaaactgagaaggcagaggcatgctacaccctggatcgaaactccgccggccgttggcgcatgtgactgctgcatagtggcgggcacagccttgctggtagcctctccgccggtcttccgctgccgcagtccttggtctgcgagtcggtccttcagtcgctggatctgtgcgttggcttcggacagttgggacttgagttcgtcggttgagggaagagaattggcaacggcggacttggcatttgaaatggcagatgccggttcgcgctgaggagactgggactttttctcagagaaatcgggagcagggattggggacggttcatcggagtcgactttcttgggggccggggtctggaagtttgcgccgccaggagaagtgtacgctggaggttcctcatcatgcacctggtggaagttagatggtgtgtatggagaaatgattgctgagtagcataccgagtcgttggctggagcggcatcacttgctaggtagacaactcggatcttgcgctcaaccacatcggacttggcggtttggtcgaactgaatatagatattagtgattggtcttgttgttcgcgatcccgcagtctggacttacgatctggctaacgctggcatcctccaagccacgggcgaccgggacggcctggaccaggaacttatccttgcacttggcatccggagcagggtcctccttcatagcctgaagcaacactatcgagaagatttagcccgccgtaattcaagcgtactcggttatcaactaaccttggacttcgacagtcttgccaggctcgatgtggccggagttaggtcgcacacagtaactggaatatggtcagataacaaatctcgagtataggcattgcagcataggatggtcggggcatactgcttaggagcggtggttttgacctagcgcgccgaggacatatgttagtgctgcttgtcccgcgacaaagaccgaggggtgtcacacataccttgaagaccacggagtcctcattcgggttggtcaggcggagaacctggcatacttcatgattgaagggacctatcatcaagagatgagctgttgatctaggcaggtctgagacaggttcgggatctggcactcacgcttgaagcccaactcggagggctcgatttggatagtcatggtgcacgtggtcagagtgaaggaggtgggagaagggaacaaagatgacaagagcacagatgactgtacgcgattaggtttggattgggaaataaaggtgtgggagggttatcaggtctaagccgatgcctcaggagtttcgttattgtccacctgggcactttcggggaaattggatgagtcagcaaacagtcaggtgatgtcactattgacaagctatacatcgtaaactggaacgtttgccttcttcatttttgtttattctattagggaccttggctgggctggatattttggtcgcatgcctcattactcttcccccggcattcgcatcctcggataaacatcttcctccacctgcatgtgatctccgcggtggggtcagtcatcccacttgcccatgtttaaattgtatacgacatatgtattgcatgttatatcgttgctcgtacagcggttcctggcaatttatgctgagaataagccagtatatgcttcatttccatgggtgaattgcattgagctgtggcattgaggtatgtggccatatccctcggccacattcaagttatgctggtttcaacattgaatgtaaatggacgtcatccaacttgctaccatatatagtagattgaggcttaaatatagtacaacttgggatacctacaatgcaggtacgtacctcatagcacacgtgtttagcagagatgtcttgtagaggactatacaattctagtcgttccgcaaatgcaacatagagatttacttgacattaccaggcttttagtggcctccagatattgaaatatccctcagatgtgccaccgagaagaacttgatgccatagaaacccggggaaggctaagtgggccttatcgctcgccgcctttctgatacgtcacccactctcccactctgctcgcgagctacctcacttctgaaccacccatttgattcaatcttgacaaattacgctaattttctgagtgttttctacgcttatatttctttcacgtcccaacagtcatcatggcatcggacctggaccagctcattgaaatgggttttgacaaagagcgcgcccagctcgctgtgacgaagactggtggctgtaagtccctgccctttcctctgatatacactgtgagcaattctctgactagctaaatagtgcaaggtgcactgcagtggctcgaggacaaccaggacaagtcattggaggagataaaggcacaagctcaagaggcacaaggcgaagagggccccgcactccaaccgggcgaacaaccacgcagcttagtatgcaacgagtgtggcaagaagttccgaggccagtcgcaggccgagttccacgcatctaaatccggacatgttgatttcgctgaatctacggaggaagttgctccattgaccgaggagcagaagaagcagagactggcggagctgcgggagaagcttgcggagaagcgtgcagggctctcagaacaggacaagattgacaagaagaggaatgaggtgcgtatttctggccttggcccggagaatgactgactagggttattttgctgacttttattatcaggaaatccgaaggaagagcactaaagaaacccaagatgccaaagaggagctcgagcggaagcaacagatgaaggaggcggccaagaagaagaaggagaagcaggatgaaatcgaagccaaaaagcgcatcaaggcaaagatcgaggccgacaaggaggagcgtcgattgaaggcagagaagcagcgagctgagcgtgcaggtgtggctccttcccagcccgccgccgtcccagcacccacttcctccggcccctctacatctaagcctgcctctgcctatacggaaactcggttgcgattccagtcacccaagggtaacatcatgaagacactgcacgttgacactacgttgtttgaggttgctgccgcattgaaggaacaggatgggatcgaggtccagagcttcgtgcagaacttccccaagaaggtgtttgataatgagttcttcggagagtctttgaaggaactaggacttgtgcctagtgccagtctccttatccaatgattgatgccatacctttcttcatcccaaaggatggatagcttttacaatgaatgagaaatgagatgacactccgaaaattgcttccatatatgaatcacatccctatcaatctccaactatccttaaatagtaatgtgttttgtttactcgaatttgacttaattcatgaagctctatctttatcttatcgcgttatcgtcatgtgatgtcgcgatgagccgcgtctcggtgcctgaagacaacgcgcccgacacgccatcattacatctctaatattgaactcgacactcgttcacaacaaaacatgccagcgtgagacccaatacccaggacctggaaatcgccatatcccatggaaccgagcactgatagtgataatcccagcgttggtgaccaacatcgcggtggtgcgggatctataaggatgccgaacgatacaggagccgccacggcaaacccattcgaggaaccccaacgccgcatcagcgaatacaccgcacaggaaattgcaacactacaagcccgtcttgataagaaattggggcccgaatacatctctgcgcgacctggtgctgcggggcagaaagtgcactatctctccgcggacaaatgcatcaatcttgcaaatgaggtgtttggattcaatggctggtccagttcgattcagacgattcagattgattttgtgcgttaatattacacaatcgactacttcgaggttggttaacacttatcaggttgaggaaaatcaaaatacgggcaaaatcagcctgggactttcagttattatgagagtcaccctgagggatgggacctttcatgaggtaaacggatatcttcgatgtgtggatttttgcttggttgctgtattaactctagccctcttctaggatattggctacgggcatatcgagaactgcaagggcaaggccgcagcgtttgagaaggccaagaaagaaggcacaacagacgctttaaaacgcgcattgaggaactttggcaacgttctaggtaactgtatctatgacaaggattatgtggccaaggtgaccaaagtcaaagcaacgcctgtgaggtccccgacgtcctccgatctgccacatgccatactgactattagaatagggaagatgggatgttgaagaccttcaccgccaccctgacttcgcaccccctcctaagaaacagccgccgccacctaaacgtgaaccggaagaggatgatctaccccttcctcgtcctgtgcatcaagcaagagtcaacaatcctgggaataacgcttctttcgagggcgatggagagtttggcagtatgtgttagaaaacacaacattgaacgttggctaacggtctctaggtgacctcttcgatgaggccgattttgcggtagctgagaccgatataggcaatcctgatgagatcgtaatagacacggagatccaacgagaacagcagcgccctgcgcccacaaacggtccagcgcctcagcgaggaccgcccgctcgaccaggatttaaccccgctgttgtaacaccatcaaaaccagagcgatggaacggctcaggccaagcgggacgacctaatcccataaatgcacgacagaacccatcggctatcccgtctcccgcattacaaggtcgaccaatggccggtcaaggtcccgcgcagaatcttgcgaaccccagaccatcagcagcacagcaaacagttggtcagaatgctgcacaaagcaacatcgcccaggcaccggtcaaaaaggaaaccgggcccgggggcttccaagggaaccaggacatgaatccaccacaaggcacaccgtcaacaggtttttactccgccagagcggtggacctccttcgtgaaaatccaaactccgtcccttcgggcgcacctcaattcgatccacacgcggagagtccctccatccgcaagacggctggtgtagaccatagcaaaagcattcccattgctaggccgatgctgtctagcgcatctccggcgccacctaacaataatacacgagactttgtcaatcccgcaacagatatgcaacgcagagtcggtgctcctggcggtggaattagcagtccggtcagcagaggcccttctatctcgtcatatcgaccattgacccggcccaacattgaccaaaggaacgtttccaacccaggcatggccaaccgtggcactatgccgccccagcagaatcttaacggaaagcggcctccattgctggacgtcaccaatgctgatgccacgcccggcgcaggggtcccggcacccggtccaaacgacccaaaacggccccgagtctcagatgcagactcctctggaccttcttccgggcctcgtccaccaacccagtgatgaacatgatctgatttgtgttttgcgccctcggagagggtgcattaccgcgcaatttccaactacaagcgttcctatttcaccgaatttttttcttcttcagctctgctccacggcatcatggtatggttatcacggcggggaaatatggcaggcgtcccggagtcctcaaagcaaatggatccataggataccagcgggggaaacacatgatattggatattggtacattctttcacattggcatattttattctgtttcctaaaacggaacctgaagcatgctggacttcagaaacacactggcaagattagacaacgggcttatgttgcagaaatatcagtcatattagaaatgaatcatgaatcacctacctagcccccggcaccaaaaattgatatcatgttcgatacaaaagtacgaacaaaaaagtacgagcagaagtatgaacacggattgggacagtcgatcctcccaggcccgacgccacgacaccggtacaataaaagcaagcacaacgtctaccgggaccttctatccgcccggtcccttcggccccttcttccgccatgctcccagtgccagcgtgggagtctaagtgaacccaggaccaatcaaagaatacagcgaatatgcagaccctggcatcgaagccacgaatccacaaaaacacccgggtgttcccctatgcatggcaatcccacagcaccgggtaacaatctccactgtccgcgttgtcggtacactggagttaacgggttgatgcattagcccaaggaaaaaaggttctaagcctggtgaaaagtgccagatctatgcctgcaggacagtcatagaaaagtaaaagagcacggaattccacgaaatcccgcggaatacatcgaggatgcggcgcaatttggtgattttgcttttttctccttttctatttgtgcttattacagtacttttcttctctcctggcttgcattatgcaccctggtcaccgagtactggtcaggcgccgaggccatgagttgactgatcggcgtctattctccggtttcctgctttgccagtgcttgaaggatattgtggctctgcagtgtccgagatgagtagtggacaagggtcttgatgcttgggcgaagatgaatgccacatatcatgtcgtgaattggccatatttaaagaagaatggatatccccgttcatcgagacataggattgcttttcattgtcaaatttcactgcccatagactttattcgtgacaaaatgtcttcgattggactctgctggagctgtacgccagcagcaaatgcagttgttgtcggccttggtcttgtcctctttggttcggtcttggttgtcctatactggagagcccgtcgaggacgcaggcgtgcagtagacttgacggtttcacaagtgagagattccagtgtactttgacgttattttctaacctctctagggagacatggtcagcatccctacttggaaaagatcctatggcctggatctacagcagccctgtaggcgtcgaccgtattggttcgaaggtaattaagcttaattccacctatcgggtctatatctgactgaattcaactggaattagatgtgtagatgagaagattcgacacaagatacgcaggtataatccagcatagtgacattgatgacatgtaaaacgaggggagacagggtgccagggtataactaggattttcatacaaaaccatttatattccgcatgattcatgattcaaagcagcgtagtctagtcaaagtaaccaaagtaacccggaatcatgatatatctcgtactggaaacccctatcacactgcaagttcaacatatcacaaagcgaaaagaccagcaaagttcttacttctgtaaccaccgtgcacattacgcacctcgtgaagtggacacatgtaattgatatagaccgctacgtactttggccagaccgttatgtacttttccaccggatgtagcttcatcctccccggtcgaactcccgggctcgaacgtgccgacaacagttcctgaccgctgtacccgcagccgggggcagtgatccggacaggaaaataacgagaagaaaaggaagtattatgacaggtctattcgggtgcgaaagtcccagaacggccggaaagggggtcatgctgcccgtcgaatcatccaggttggatatacgatctcatcgatttcttgagaacttcatgtgcatcatcatcccggaagcaggttctatttcttccgagttggacttgattgtcattgcatagcctgaaacgtgtttgcttttgtagtttgatttgcgctgtgcagtgattggagtgtgatggatcatgtttacaccccttttacttgtttcttgtcataaaataataataaaaggaacttgcttttctattcatcgttatcgtaaagaataagatcacatttgtgactagattgggatcaagccttttcccctgcatagttcgcttgagaagacaatgcgcttctgcaacgtctccaggctacgtatggcctctcaaaagacggccgtgaggatgatatctatgtcaaggataacctattaccttttagatggtatatcgccttcttacggagtctcaaggttctcatttcgtcctcttgtaaactcaaacaagttcaccctgccctcatgtctgactccagagcttgtgttttcctttgctctgtgggatgaatagcctacatttacattggtgtgaaaggaaaaatattaaatgtcgttgatcaaaggttaaagtactgggtattaatcataacaaagcccgctaaacgatcattgacttttcacttttgaccatttcaacaactgaaataggaacaccattcagctaggaaaagcaaaggatctcaaagctcaaccaggccatagaagagatggaaataacatcaaagtagagaccagatagagcgggttgaggccagtagaagaagtgatccactgaaaatcagactcttgaatctggatgggttagctagcgacgagataggttgggagggaaagatctaggagccttcgctttggggggaatcgtcgcagggtcaggcatggagaacactggattcgaagcttgctgggaagctggaccatatgatccacccatggaactcggaacacggcttgcaacgttcaatgagggccgattctcagtattgaaatgctgggcagaaacggtacggacgtgggctgttggcacatcgcgcaatgtggttggctcataggcagagggcgccggaccaataacgtggggtttgtatggcgcagggccgattgtacgagcgccggctgattgaacatcctgttgcctgggaatgtttgggtggctcgcgctcagcccccgagtcgtggtctgggatcgcaccacattaggtccaataacgttagcattggaggtgatagggcctacaggtcctgcaaaaatcgaatcgttgagagtctgtggctttttcgttgcctcctttgcacgagtagcctgaatggacgcatcggatgtagtggccctctttggaacatcaagcagacgaggaactggaactgggaccacgcgctgcggttggagaggtgcggctagtttatccgaaacctgaagagtttcgaactgggagataatgtcggagcgctcactcttggttggcgagagctcgggcacacataccttgtgcgtgcgtttatccgcagaggggggtgagttagaactggaggacggtggggccggcgatcggtgcccctcaaagggggtaaggtcacgccgggcagccgaagaagcttcaacagcgttagttccttgctgagatgttgaaatatattccacaagtgcagccagattacccaatcgactttctacctccgaggatgcaggtggtgcatatgccgtagggaccaactggagcaatttagattcaagaatgcgttcaatatcactggtagttgccaattcttgagttgtacgaatgtgtctgcggagttcgcggagttcttgaacaatctgcggaccatagataccgaagccgtcaagtgcttgactctgatcattgcggcgagactgagcttctgggatcttattggtcgttatcttgggggcaatgacttcgtcaatgctcttaactggcaccgactccccgggtctctccgcaaacttgagacctgccaattctgcagtacctggactctggatggccactgtcttcaaatggtggggggttgtcgttggtgtattaatcggagagtcatccccgctgagaagatcttgagactgagctttctgcttggtttcctccttctggctatcaggagaaatcttctgcttgttgtctttggtttgagcgaccttcgggactgtcgtcttcttggcatcggggaatggcaggggcatttcggatggagcagtgcccttctttcgtggctgttcgcctggcggaaccttccactgaatttcatccgcagcgcttgcgacaactgctggataagaagactgcaaaccagtcgccatttctttcaccattttggacttggcgctttgttggacaggaacagggcgagccggtggtgggctgggtgcttccactggaggggctttatcatgtggtcgagatgatttgggtgtaccaggctgggccttgcggcttttggaagatgctgttttatcaaggggaacaacacgaggtgacggcgagggtgtttccactagataaggcccaatatgtggctgagatatcttggctgcagtagcctgggctttggaggaatggaatgatgcagtcttctcaataggaacaatacgagacggcgttgtcgctgttgccactggcgaggatgcaggcttcgaaggtagaggaatgcccgccgtcttctgcttgggtgtaacccccagaaccgccttggccttttgctcgttgggcggaatggcttcctgtgcagatgcagtcttctgcattggagcagaggggattgcatcaacaggcttcttgtacgtttcagtagctcggcgagactgaaatgaggacataaagtccccagggtcagagattctagtggcgaagttgatgctggtcaaaaagttagcatagaaattccaacaacagaagtctgattacttacgctggcggtgggcgccggggtctgctaggggtaggcgggactaagaacattgttagctgtattctttttctgtgtgcgtcaccaaaacgtactgtgaacatgctcttgggcgcgacccttaccctttcctttgcctcgtccacgtccccttcctcggtcacgagcatcgctgtcatcgttgttgcagtttagcgcagggtctagatgaatactggccgacattgtagtcgagcgagcgcgcggtcctgggcgtcctgagcgagtagagtttgcatgaagggagcctctgtgatttctcttccgttaattggcatatcttaaatgtcggagcaaatcttaccgtgtaggagcaggaggaagattagcaggtccactaggaggagggggaacaaaaccaccccgtcctctctttcccatgacaccaccaccgcgacctgcagatggagctgggtgagggtgattggcgtaggttcgcggctgacttccattggggtgcaacatggcgtgcaaattagctcggtgggactggccggaatttatgtcatcgagttcttccattccacgagtgtctccgattttagcatgcaaatctgagacggagattagcacaaagacacaaaggggcgcaggagagtttcccctttagtacgtacttgcccattcgctcaattgagctttatctctctgatcgatacgccgcttggattcgatgtcagcaagatgcgcgcgagcctgagtagtggaatcggcggtggaaatcttttcacgccgagcggttcctaggtccgcctgttggtgccgtcagttagaaaggtcagaagagaagtgagaggctagatgttaccatttgaaggatttgcatcttgcggagcttctccgctgacagctccgatgattcactcattttcctggtagtaataacggcaagcagagggtattaaacgctgttacatgacacgtcgttgtcgacgtgcccaacgggtgtgactgtggtttggttggtcaaagcacgaagagtgagcgatgagtgagtggtaatagagatcagagcgtgggagatggtgtctcccaaaagaatgtatttgcaggtcgaagtgacctgagggacgagggcgatgaagacgaaatgaggcttagaaaggcctaagcagggcccccaagggacagacgacaagagggggtactccgaggacttggctgtaaagcgaagagacagacaataagcagagttgtgcgaagcacccgaaacaagaattgtgagaaccgctgatgggttccaaacaagcgaagaagaagcgaacaaagcagggaaaagagtgggtgtagaagaaagaaaagagagcagatgggaagagggtaaataaaggaacaatcagagcctcggatcaaagacgcgacgcgtttgtgaatgtgcaagcaatggtacctctatgcttccaaggcgacttgtccgtcgcaccttccgtcgaggagttttggccttggggactgccatgtccacgtggatgcttccacgtgataatgaagccctatagatatacgtcgaagagccattgataatgatcgtgcatttttggatgcagaaagcgagcggagttgtacaagatgagaaacgaggctgaggggttgcgatgccggaatcgcaaagcgcatgtgtccagtcgttgtccgaggaggatttatttcaccgtactcggtctgactttagagtacatctatgtatacgtgcttaggcacacggtatctaccaaattacctgatacctagcttgagacattgaaatccactcctatatacacaacggcacatagcgaatgtttcgaatgagaatgctgtagcatataatacataacagctatatgttcaaagtgaatacatatgtacacggcacatggcatcaacagacttctcgggcacactgagagtataaaccgccgctatattgcttgaaaagtctctctaaggtgcactgcaactatgagcctcgccatcatctgtaaaggcgaaaattcaatgtaagcatccgtgatgagtgcagggtcaaatggccattcaatttggtccaattgcaaccgtttcgcggggcagacttacttcgaatgatcttgataaccgcctgcactacgctgacacccatcacaagcaccccaaagcaaatgcacagatacgccggaatcttctctcgtcgcttagcactgctgagtctgatgtaacagagaggagggaatatataggctagagcagcagcactggtcgcgccaatgagctcaaacacacttcccagatcacaggttatcaaggacaacaccattgaagtcaccaccagcgccgttgtgaagataacatgccgaacagtgttgtgcggctcgtcgggaaagtagtaggttgtcatgacggaacggcagacgaacgcctcaagcggcagtgtggtcagcatgttcaggccgaagcaactagtcaaagtcagtcaagaagctctatatcgaagtcaatggggatattgtacaatcgtgcgatgttgacgacgatattgtctgatggaaagttgttcaaaacgttgccctgggttttagaaccgaatgataggaaccctgcgatgcccattgctaggcacatcaccagagagattcctgtcgagtaatgtgtgacacgggtgaagcggtccagtgtcggctttttcaatgagccgtagatcagaagactgttgtggtctgtggaaattagcgattgtgatatcagtaggatttaaaggaacatacgacaaacaaaagctggaaatcattagcgggttttctaattattgctagggacagctaaaacttaccaaaagagatgacgccgacagcctggaaaaagccagcattgaaaataaggtggcttttgatctctccacgcgattcgggtgggacccgaaagccctgggtgatgacagtgacaacaataactatcatgctgaccaaagccaaggcggatgctttcgccagctagatgactgttagtctctggtaagtactaaggaaagagagagctgaccttagcgatgtctcgatacaaagacaatgggtatgaaacaactaaaacgaagataacaataacggcccggcggtctgtgaggagccacagaaaggacatatccctaagagacggaaacaaagcgcctagaacgtgtgggatggtatcgccaacgataatacagaatgcgaccatgcctccgaatgcaaatgcccactgggcaaccgagatcgcaatgagaccacctttcccgaagcaatgctgcattgtcgcctggaacgaatccgccccactcaatttggagttgatcacaatcaatcgaatggtccaatccacagtgacggtcaaggcagtcagcagcaggattccagttgccatgcctgcctgacgaagcgcgtaaggttgtccaatgattccagcaccgataatactgttggccatgttcatgaacgccattttcatcccactccgcggccgcgcatcctcgagatgctcttcggggaagaaatcgtccgatgtcgcgagtgtcacactaggcgcttcgatgtttgtaagaagaggaattgattgaccactgtggtgcgttcttgggccctggtttccatgttcatagtcctcatcctccagccatagtgtgtcgtctgggctgagagcacgctcaatggaattgcgattggggctttctggctcctcctccaggtcaaatcgcactcggttcatggtacggggtgtacggcgctttccatcggccgcaggttgagagattgaggagtggcgttcgccatttgtcgcgttatgtgaggggatcggcgacggaagaggttccgggtggaaagctaaatcatgctcctcacttgaagctggcagaagtgattgagcttcatgttcatcctggccattctgggcatacaggtgattctctgacagctcatcccctggcatcgctgaccgtgaatagttggaagtgtaacggttactttcaggccacctgggatggggcccgggccacacgtgataggctatcttatcgataaggacgtctttgatccgataagagataacaacggtttgccatgtgcacgtcacaggtactccactacgcggatgtctacgtacttacttctgaatggataactaatgacttggcgacaaatgatcagggacaaagataaatgaatggatggccgtttcttaaaagtaaaaagcacagccccacggcacaaaagagcctagtgaatgtggacaggtaaccacagtacacacaaactaacaaaggttatcaaccaggtcgtgtctcacttcttttgacatctttcaggagtcacttgaggcaaaatgtgtaatttactttagtgtattttttatatctgcgattttggtgggaatgggttgggatgagatcagagcatcaaagggccctgggtagaccatgcttatatatcttcgaggaaaccggccaaagattctgagaaatcgaaaaaaaaaaaaatcattagctatacattggaaagccatctgcacaggttacacttctttttcgcctttcttgtgatcgtgccataaatctgagaagggaaagaagatgagaagatatctaaaataggtctagaaagacatgacaagaccgcataagagccgactactcctgtctgatttatttaaatatttaaagaatggaacacaacttcgagaacgctgttagcaaaagttatcgacgccaatggttatttcaatccggaatacagtcctttcgatgagagcatacggtctttaccatcctgatcggcgatgctggatattttggatagcgaagagggagtactgtgctgggtacgtaggcacatagagaactcgaggacatacaggtacaatcacccctattgttaccactatgtcattatgactagctagaccgccaacgtaaccagctgtcctttccctcaacgagctaggtaaagaatggagagatctttgacccatttcataaacacatttttggctcgaaaagatagtgccactatccattccctgcatcaccacgccaaaaatgtctaagtctacgtttcacacctttgcgttagttgtttttgggggccgggtggtcgacatagccctagcaacggattttgtgatgattgcgaagaagtttatatcggacgggctaaatcccacatgtctatcggggacccatctttatgatatcacgcatatgtctgggccgtttctttttgggcgagaggacttgagagaaagagtcccgatctacgatagccaggaggctacaacaccgttttaccaactagatgcccgtggcgtcaaacagcacgtcatggactggattagaaacatatccggtagggtaggcgctggcgatcgcataataatcgtgttgatcggacacggtcatgcggaaaaccacgctctcacgctgtatcctcagcgtgcagaacgtgaattcctctctaaagccgagatgattgccgccctctcggtcttgccgcccaatgtccgcctcctggtcgtcaatgaggcttgttactccggttcctgggccactatagcccctgatctaggccaccagcgagatgtacgtgtcgagacagcagccacggtgggcgagaagtcctgggcatatacctcgggttccggccggaaccggtgttctcttttcggagcgacatttgtcgaggacatcaccactcaccccgaaggccaaatactccggcatcgccatcgaatagttgatgagatgctatatgttgggcctaaccaggaaacatccacaccactagtggttgcctcgacccgcgcccttttgtcacataacatgtcacacttcatactgacgccaaagattgctactgcaatcaccaatgtagcttctacgcagcatcgccatgagacccttctccggtcaagggcatccccccgcaccttctggagacgtcttcgtcgctcggttggcgtggaaggagaaccggcgcaggcgttgggaggagagagcccggtgaaagatggtaccggtaccgacatgaaggatgccgttatatcgagctacctggaagatctcggaccgctgaagagtgccattggcaattctgcccttgtagctgccagccagatcgctcttgaaggccgttttgggccttcagatctcaaagaccaggtgatagcgacgatttcttggcaggcgacccagatgcaacgagttggccagttgctggaacatctagcccagcagagactagtcacggacttggtcgacgtagaaatagccaagcaagcactagtagaccacagagaacacgtcgcgaagcccttggtggagaggtttatgaagggagataagctgaggtgtttggaaaaccccccggatgaaggccatgtcggggtgcacttcgatgaagctacaatctggctggttgacgtcttggcctataaccggctgatgtacccgcacgacttcgatctcgatcgcgtggtagaagaggtacttctgtttctagcttagtgtgtgtgtttgtacttcttgccgctcttcttccgcacaagaatgagtctacccaatccattgcttccacaaacccttgtgattgaaaaatgtcttggtgactcggtgccacgggagattcattgttagtcatatagcccagtcagacacaagtccctaatgatacggagattaccatgatgcgcgcagatgtagaacaaaccaaatggtgggtggagaactgagatacatttaaaagacgggcgaccagctctacctgtaccactagtacgccttgcgaatatccatccactcccttatgggtgcccacttgcggcatgtatgaacctgtccaactacaagcctaactatatcattattataatgatagacaggggccggcgataggtttccatgacattggatagcttgccgcagctgatcgaggcaatgatcacggtgaattctagtccaattatccggaaagattggagttgtaatagcttcttccagtttgccgtggtggtgaagatgttttgagtagtagccaatattgagttccattcagattgcgttaaggcagtggagggagtggagacgaacggtgcaatgtaatagatatgttgaatgctgcggtacggcaccacaagagaaggtggaagccaatggatcacatatgccagtctgagatgtgttgctgtcaagtcgagggtagagctcagcaacagtctccattccaaacaagttctataacaagaatcagcttttcagctgagatcatggtgcaaatacaaagctccaaacgatatgaatagtgaaagtaaaccgacctttaaggattggctgaacgcattcttaggtcaagagtcttggaagtcatgtgctcgtccatagctataaggtcatagccacctgcgcagacctacttcagcgattcctttcccgcttcaataccccaccaatcccccaatcactcattcaaatgactgccttgcgtcccaaaaagaatagtaaattggtgatgagcttcctccacaatggcacaaaagctcaacttgggtcgatccactctgcgaatccgagattcaaagttgcagcttcgcctggccgcatcagctaatttcacccagccactaaaccatggagccccccaaataccaattgacctctcacacttgccaaatgttgaaagtgtatggataacagaggcaccagagctggagttacgcttcttcatcgggggaaactggggtcagaatgaagcagcggcattcatctcgaaaatgagaggcaaactctgggatatggaggtgtgtgagagagaatatcccctaaactggaaactgaccattccttcctccagatctggtcagacctgggattctcagtcgagatcaagacgggtgcaggcgaatattgcattgacacttctggtacccactgcctcgaacttggtctgcgcagaggatggccaatacataatcacaaaaccggtcggactttacccagtatgatgaccaatccaccagacgcgtgtcctcctcccggtgtatcaatagctacattggcttcaattgatgtttggctggagtatcgctttcaagggaaggatataccgcaatcccaggatccttccgagttggaggttggtcttggacaaggatcatcggctttccccggtcctcagctgccagagacaatgacagaaatcgcgatcctacaggcggtgcatgacgaggatctccatgaggctattggatctcagttttcttgcatatctggaggtggatcagacccatcactcgaggaactcctccgactgttcgaccttggaatccaaagactggtcatttccaactcaattaaagatcccacgattagtgtctcacagcaggccacgcttaagagcctcgcagatatctctcccgcggtgttcgaccctggatatcgggatgtgagttttccatctcagtgatgaaaaccaagcactaatttcacctaggcgatgaaccagcgaggaataacaattccaataatcaccaaagccgtatcatctatgctggcaggaaacaaagatccctccacccaagctaaactagcagatttgttagagttcgctcgctcccgccacccggatgagttgatgatacagcctcaatttccaagttggggaactgcagtcctctcatcactttggagtgtcgcccagaaaactgtgctcaagacaaaacctacgaaaagacgagtttcgatgctctctgcggagtgtctatcaactggattgactggattaaacgaaaccgtgagtcgcatgcccacggaccagcaacaatccgacagcggaaattccggactgggtcgttctttccaaacaggatatcacaacgagaatgaagaaagtgacatatttctgttgaatagcgaatccgaggaccagcttttggacaatttcagcgaaacaagctttacagacattggggattcgacccaaacatcccttgacacgttactgtcaacaattgggtcctctcagacttcatacagtgatcatgatgccatgcttctctcggatcatgacgaattggcggattatccgggaaactatgtgacggattatgatccccgagaggatatggaggcatacgacacggacattataatggctgactacctttagattcttcgtatgataccttcactgtgatatatgataacacttgtttaatgatcacgatattatcgatgatattgagcattgagaagtaacgtccatttggttaatttgacgatgccgacatctggaggtattggtgtaaacgagaggccaaaaaccaaatctctactacatacatggatgaagggtcaaccaagtctactacgtatgtagcttcaactgtaattcaaaacctcagccttcaaatatgtgtctattgcaaaagattccaaaaattctctctatgaaaagcacgtggtgtgcttcgcaccactatctaacagccccaatcaacaaccttcacctcgttggccgactccgtaattattcccggctcatatgctgcaatgaactgttcgcccagtggttgggccttagggccggcatagagccggtattcatcgattatgcccgaaagtttccgtcgctgcagtttgcgtaaacagccgatgacacaagcggtgcgatccatggatgctattcgaatattaattagcagacaggctacggcatatgtcattggaaataggaaatcttaccttcccctaattacaatggacggtggtttgccacgtcgataatttttgccatgatggcatcgatatcctcatcgtttggcgcttgggcttaagagcgaacgtggccacatagatgaggttatccaaatggagatgctcacatcataggccggtaggaccgagaagttctgcaaggcaccgacatctgtgtttgaagagctaacttcacggcatttgttgacctttgtgacggatgcgtacaggaaaatttggttagtagaactcctcggctttactatatggggtctccgtcattttgctgcatggcaatgtcagccgaagagagtatgtaggatgagggaacagggaatgttacaggatgatattgacctcttccactttggagatcgaaaaggaagatagaacagaatttatagaatttctgatccggaaactgtagccttccttgaggctatatgacactcagtggtcatgggctcaattcaaacggtccgatataggtatctgcatgatgccagcagatatagtggaagatttggagtcaagtatggtgccgatattagatcctatactcgcagtgtcctatccctgtagtactgtatgtagtaggacgcttcggcggtaccatgagccataaaacggtcagacgctatagggtggtagttgtctagcaacaacgacgaagggtaaaccgtgcgccctggccagcggtgcggggtcctgtggcgtgcgtgtcgcgggatgaggccattcccgttgaagtcgagggggaatcttctttcagtcgggtgttgaacaggtcctatacattatatccccgagtggtacctaggtagttagtagtctttaccaataatagatagtaactagtaataggacgttatctcactctgtcttgtcttcgtacatgtgacatagtagaagccacgtgggagttgagagttaataccttgaacatcagcacagagtcgaagccgatgctaacggtgcaatagaaagatgagcagatgcgggcgaagaaaggtggtcatagcccaaaccaacgccaagtagatgtatgacgttaccagccctcagtcaggttgtcgtccttcaggcgactcggtataatatataatttcactttcctgctatgtttataggtagtattgagctattgggtgtagtaaatttgcagcaagagtgacgagagagaagagcgattctgattctctgagaaactgaggccactaataactagttaacgtaatccactagcgagctggccacactagcgagctggccaccctacaaaaaacgcgtccatgaattagcacttagtcaattaaactatctaccatgccaccaattcgctcccaatcctccaaagaatcaactgagcaagagggcaggatcttattagctatcaaagcttttaaaaataaagaaatctcttcaattcgtgaaactacgcgccgtttcaaaatcccccgttcaaccctttcttcacgtcttaccggaatacaacaccgcgcgaattgtcgcgtaaattcgtgtaaactaacagaaattgaagaagaatctcttcaaaaatggattctctctatagattcccggggatcagctccccggccgtctatagtacgagaaatagcgaatcttctccttgaaaagcgtggcactaccccagttctttcggtcggcgaaaattgggtgacgaagtatataaaaaggcatcctctcctatcctcccggttttcgaaacggtataactacgagcgtgcgaaatataaggatctaaaagttataaaggactagtttaatcttatttaaaaaactatcctacaatttgggatctacccggacgacgtttataactttaataagacgggttttgctataggattgatagcgactacgaaggttattacgagaagcgaatactacggtcggcgagcacttttacaacctagaaatcgtgaataggtaacggctatcgagtgtacgaatgcggctagttaggcccttccactatatctgatttttaaaggcaaagtctttattaaatcttagttcgatagtcttccttccgactagcgtttcgaagttagtcctaatagctagactactaacgaaattggacttcgctagcttaaaaagctctttattccgaccacttttatacggataaagggggtatatcggcttttaatactagatagctatagaagctatttaacaccgaggtttgataaaatttgtgaaaaaaaccgggttatactaatctatatacccccgcatttatcctatcttttacaacctctagatataggctattttgcggtattaaaacgagcctataggagactagttgaattccggatacggtacagatccaattatatagataaattggacttcctagattcctatcctaccgcacgaatagaagcttttaaactagagattgttaaaaatagcttctaatctgccggtttagtccctttcgcgctagagagagtgatttcgaagcttgatattcggcttgctacactaacccccccccccctagccggggtagtgattgggatctaaaaacaccttcaaactgtaggcaattggaaaagcaagcttcctctatcaaagtattgcttcgtacgagatcaggaagtcccctaagtccgctaaattccgctataaatcaggttttaaaagcttgtcaaatgacgatacaatccgctacacttctagagagagaagtgagtgatttacgcggtgaaaacgagaagaagaagtaaaagcgtgctagatctgggaagtatctatacgtagagagcggtctctccgtgtaggaagtatctgcgctgattacacagccggtggaagcagctgaacccggtcccggtcagcatggtgaatcaggtttacaaccgcgtacaaaacccccccgggggtgcggagtatgtaggaagccaggacataggagagagacatgtccagatagatgatgtttttttaaaaatttaatttaatggcgttttggttgagataaatggatttgaaattagtatgttggataaagtggccagctcgcatagtgtagccagctcgctagtggattacgttagttaactataactaactagttagttaacgtatttcacaagcgagccggccacacaagcgagccggccaccccacccaaaacgcgtctatatgtgatcccagaagcccagttccttatataaacatgtcttatgccttattggccggatccatatggacccgtttctgcacttatgtacactatcgttaccgtattctatagtacttagccgttagcaaagctaactcaataaaaaccatacgatcctttccgaatctcatctggtagcatatcggtataggccaccttccacggtggcctagggaggcacgagatagcaccgtatacgtctagtagggcgaaaacggtgctaaaccctctcgtcctatcccgataacgatcctacggacctagatactaggtagggaagcttataaaaccttattttctccttcctttcctctactctcccctccggctctctcggcacactagattccgagaacgagggggaagaacggaaaaatataagagataatatcctctcttagacccggagcgggtctattaataaaaaaaaaaaaaaaaaaaaaaaacgcgtaatctatagagaaatatagatttataaggacctatatagccggacagaatcttagcccctaagtgaatatatcgctctaaaggaaaccttaaatctataaacgtccgtccgagagaaataccgatctatacgggagtagaggtcccgctacctagtaaaatctatatctaggcgccgttaaaagatagacggcctcctaacctaataagaggaatatagaacttattatttacttcctctaagaaagaaaagaaccccctatcgcccccgctaggaaataataatatctacgtagccctcttaaggaaataccgaagctaaatttatagctaacctctcggtagaggttaatatagcccttaaccttctagaagtaaaggaacgaaatatcttcttatatatatattccactatagacccctagtaggttaatcccttagtcgaacgggctataaatagggcttaggccctctaggcggagcgatctaaaaccgaacggcttatagcggcctttagtatagctataaacctatcctataggttagacctcccttctaggggagaatagccgctaccgaatacctctaagaaacctctattatctatagctataatcttttaagctatagataaggatacctataagaggttcctaaacgacttataggcaattactaattataatagcgctatccttaacgacgccgcctataaatagacgcgcgactacgatcgatacttcttagagctagtaaagcttaccggttataactctcctaataaggtaaagatactatatacctctaggaagctcgtaaaggtcgcctagtagcgtctagaatagcgcgagcgataatataacttacttagtatagataacttcctaatataggctatatttaaggaatagcttaaataggaatttatagagtacctatctatagagaaactctataagcgctataaaacgcttaaataagggaactaatctatataagagtacgccgtaaatctctagtaggttatatccgaccttaattaggatattccggacctaatattaatctagcgatttgttactagtacgaaagctacctactacgctaaataggctaaaaaacgagactagcctaaaacgattaaggatattatcttctatttcgtttagtataagtaagggcgggttatcgcccggagatataaaaggtctttagcgagatacctagacgctatagatattaatactattattagctctatagaggcttatactatatagggcctactaccgtttaaagagacccgagaatattataactataggaaacgggggtacctagcccgtttctattagaagccgaagaccgaggagataaaacggaagtaaaaggcggtatataaacaatcccgctaacctataaaaaactagtatagctatataatatagaagccctcgtcggccgcctataataggctcctatactaccgttatttaatatagataatatcctcgacccttattaccctataaactcctataaacgggcctaaacggagccccctccgctatcttagtaggggcggagggaaagacccctatatctatccgcgtccttaaacgtccttactaactccctaacgttttactagggaaagatctatataggagacgccgacctaatatctatctatatactcctagatagcggagtaagcgatatattcgtctccctataggtcctcgggaagttagatagatagatctaggtataaaaacctaagaccctattactagttactatcgtaaatagcgagcggctagaaacgagtggttatactatccttctagttaaggtcggaaactagatagaatagattaaagcctagatcctcctaaccgagtacgatataatccttagccgagatttcctctaggtagaaaacctatatatcgactagcgtatatctattataacctttatagattataactattatatatacactatttaccctataaataacgcccgcgttattataagaggaagtatatactttaatataatatcggctaaataaatacgccgactcctctagaaattagggagcgaagcctacctttttatagtctatctaacttatcgcggatataagaacgaagaactagggctatctaagagcgacgaccctagaatttagcagatccttataagatataaagatcttttccgagcggaattacctaccatacttcccttagaacgtaatatagcgtataaaatcgatataggaatatatacacctattaatattaacgtgtatagactctcctccgagaagctcgataagtaagctagataaatcgaagatcttattaaaaagggcttaatccgcgagtctaatagcgtatagggcttcttagtcgttttcgcctagaaaccgaatagaaagtagcgaatatatatcgactatcgagccctaaataatataatagtaaagaatagataccccctcccgcgaatctaaaagttattagatattatcgggaatatatagatcctctctaagatcgaccttatagccggatattagtagatctatataggggagggttctatcgagaaaatagtatttaataccgtctagagaaaatacgaatagctcgctataccgtttagactatataacgcgcctactaccttctaatctatcgttaataaaacgctatagcccctctttagctataatatagtagtatatctcgataatatccttatcttcttagccacacttaataagtaccggaaatatatagaagaagtcctagcgctcttatagaagtaataactatatacgttaccgactaagtgtacgttcgcgacctaggaactagagttttatagttatatcgttagaaatagaacgatatagcctctctcggctaaagtcgaagctatataggcctagccgcgactaaaaactatctataacgtctattagttcctcggcttagctacttattactatcgatttatttataactttttaaaggtatatataccactctataagctcttaaaagaaagtgatagtacacttcgtaaataacgtttccgccctattacctagatagaagtctataaaagcgcctttcggaaggtaaaggacctccttacttccgccttagtccttaaataacccgaccggaaccgactatatattatcgaaatagataccttcgaataggccctcggtatagtccttatataggaggacgataatagaaaactctatctagtagtatataataagcggaagctatatagcgccgagctaaactaccctatatacgagaaagagttactagctattaaagaagctatctatatataggataggtatattaatagagaccggttcgagactattattattaccgataatacgtccctataatacctaaatactataagggagtatagtaagcgcctcgcgcggtagatcgccgaattctagtagtattagctatctatttaatactaaaagggctcggagaatattatagcggatactattagccgccggctagacctagtcggaactacctaagctaatataagcctcgagaggcctattagagatagatactttacgcttataacgatagtgtatagtatccctaaagaagagtagctcgcggctataatctagctcttataagatagtatagagccggaggacccgactatccaaaaggctataaagaaatataccgaccgacttagcttataaaatactaatatattcgcgcgggctcctatagaggaaaactaataactcgtttttacctataaagatagcgttatctccttatacctagatcccctatttcgctctaagctactctaaaaggcttattataagttcggctacctcggcttcctaggccttaacggtataattaggcctcggggttagtggctatcgatctaagcggatatagaggagtctataaagaattacctaaattactaggttttatagggctcctataaagacctcgaacgggaagctatataatatatagtaataagcggtatccgcctattcgagcgttagggaatcgaccttatcggccccctcctaacgataccgaataggaaccgatagattattatagcgatcgactatataactagctagccggtcgcctatatagtcctagatataactaaagagacgtttatagaatttttattccgcgatatatatatatactatagtatatttaataaactactctcggataacggtactaaccttttatcgggagccgtataacactttataagttaactaagagcctattatcgtacgataataccctactatccctatactaatagtaagatagagaattttaatagccttattagtcgtatacttataaaataccttatagataagcctataagactttaggacgaatatcttataaaagcgctattcgccgcctatatataggagcacgctatcactcgaaagagcccctacttcctagtctatagtatatatccctatattatcgcggatagaggtaagccgccggacgcctaggaaagaactaactaggataagtaaatctagtagcttatagacgcccgctcgaaggtaaacgagcttctacttatctatactatccggaaataaaagatctaagacttagtagttactaagactagctttaaggccggtaactaggtcctagtacgaaataaagtaaaatagaaatttaagagtatatagtttagtctatataaggtcgtatacgcctacctattaggaatatacacccttaccgaactaaatagacgtgttctccggaaccttattaatagtgcgaggctaacagatataaacgtcggcgataatcctagcttataggtatcgccggccggctagttagctctacgttaagccggttaaaagattagccgcctagaagaactctataaaatcctcgataaggtagaaccccctccgccgatatacacggacctctctatatttataagggaggaatagtaggaatttaggcgcttaggagcccgtatagaattcctagaggaggaagttatagctaaacgtattatcgtaaaaacgcgagtagccgcgcgtaagagatagacgaaaactattaataaggcactagagtagggcccgctaggtgctaacgagtaggatatagaagtaaacgactacaaatccgaggattttaaataggataaatccgataggtataaatcggctaaggacgcttattataagcctaaataaggcttaagccgaaccttataccctttcgtagttattattctacccctatctaaagaaatctaagagcttacggctataagaagctaggtattaaaagatttattatatttccggtaataacaccgaaggagtcgcctatagaggactagactcgaagaaaaacgaatcgtattaccggccttaggaacgccgaaggagccgcctagaaggggtaggacttaatagaaactatcgctaaaccgcgcgaatagaggtataaggccttaataaaaactaatataagtagaaagagggtataaggcccgaaaactaactataaggatccgtctaccttatctttaatagtttagaatatcactagagtccgaactaccgtcctcggacctatcaccttccgctttagtaatatcaccctcctttagctaacccttcttaagccctagatcctatatagcggtataattataccggacgcgcttacgcacttcctagagacgtttgtaaacgttatagaactatagcttatcctctatatagtagatattaggctagtctaagggagtcgcgtatattatactatcgaaagccggaccggagcggggtgtggtatatatagtattaggaggattaggtatatccttagtacgctttttcttctaactacccttatctttaccgctaggggcgttactagccgtacgtttctttatagacttagagggagtggtaatagcactaccggctttagctagactagcggaagccgggatagctttacctttacccttatccttagcgggaggtatagtaataggattaataggagccttactaggactaatagctcgtcccttctccttactagcctttttcttacctatataaggaggtctattagtataaacgagtatattcggggccttaagtaagatactatcgggctagaagcggcgaacgaggttatatatctagaacggagtcttatagttattatcgggattattagtaagatcgccgattaggcctagaagacgttagaaaagaaacgaagataaaactatccgaaaaggtacttataaagggtatatttattagccgtactagactattagtaataagtatacgataacgactactagaaacctaacctagcgaggaaaacgatccggtaaaaggaaaacggactattacctttcttataagacgcgtaagctttatttaaaggggctttatagctaattatttagcctagggctatatatatatttataaccgaggatactatatagtccttagtgatacgctaatcgactctagtacgcttagggtctatatagtactataattagtcctacgaactcttcgagagaagtataaagagaggtatcctagtagcgtctactcctttacctaaaacgaagtagttagcccttaaacgggtatagttagagtagggaaaacttactagcgtcggtttaggcctataaataaatagtagcggccgggataggaagtagaatatataactaacttctatcgccgctatagttagtaataaccggagtagtaactatacctctagcacctttacctatacccgcgggtccggctataaccgtacctactcctacgctactattattacctcctacgctactattaccgctagctataccgctattactaccggccgcgctactattactatcactatcactatcgctattactatcactatcgccgcctatacctccgagagctttaagagagcttaggggagagggaaacttattaaaaacgcctaattacttctaggcggctatctaactagcttaatagaagttatcgcctcggtatccttcctctaggaggtttataaaaacgagacttaccttactaatatcgaccttaccggacttagttaccttagtgttccctagggttacgtatagctctctcgcctaccgctcgatccgcgcggcctcggttagctctacgtcctagggtcccggctccgcgttatagtacttataaaaaataagtgatatacgcctaggcttagtatctataggcttaatagaaccccgcgcggtagtagtgaaacttctagtagtccctaaggactcgctaaggcgcttataaagacttcgacgaaatatcttcgatataaaagcgtttatatagataagaatcgataaaaattaataagaaagggggataaaagggggtaaaagtagggtagtaaagaaaggaagagagtagaagtgaagctatataggaaatactacactatctcaaagtgggagggcccttttatttataaagtcggaagtgagagtcctttaggtaacctatagacactaataggtggagtctataccttagaagcaccctcttttatctaaacgcctcttagatctccctttaataaccgctagtaagctaattttacaccctcgctacctattttaggctcctatcgaagaccccgagtcttataaaggcttaaaaacctttattactactattcttagagacttactaacgtatttcctttatttatacccctatatacctacactacctttaacgaattcgattttatacgtacggttattaacgatacctttccgggatctagggggagtttttgagctccctcacgtgaccttcgggaaacggaggaccgttttcctattcggttagggaggatataatcctagaagcctagttccttatataaacatatcttatgccttattagccggatctatatagacccgtttctgcacttatatacactatcgttaccgtattccatagtacttagccattggcaaagctaactcaataaaaaccatgcgatcctttccgaatctcatatatattagcacttagttaattcaaccacccgctataccaccaattcgctctcaatcctctaaaaattcaatagagaaggagggtaggatcttattagctatctaggcttttaaaaatcaaaaaatctcttctattcgtgaactagcgcgctattacaagataccacgtttaacactttaagaccgactaaacggccactaaagccgcgcgatttctcgcgccaattcgtataaactaacagaaattgaagaggaatctcttaaaaaatagattctctctatagatcgacgtggagtagccccccggccttctatagtacgagaaatagcgaaccttcttcttaaaaagcgcggaactaccccggttatttctattagcgaaaactaggtgacgaactatataaaacgacgtcctcttctatcctctcggttttcgaaacggtataactacgagcgtacgaaatacgaagacccgaaggttattagggagtggtttaatcttatttaaaaaactatccttcaatttaggatcgaccccgataatatttataactttaataagactagttttacgatagggttaatagtaaccgcgaaggttataataaggagtgaatactatagtcggcgagcacttttatagcctagaaatcgagaataggtgactattatcgagtgtacgaatgctactagctaggccctcccgctatatataatttttaaaggtaaagtctttattaaatcctagttcgatagcctcccggaggactagagatttaaggttagtcctaatagatagacctctaataaaattggacttcgctagcttaaaaagctctttattcctactacttcttcgcgtacgaagggggcgtatcggcttttaatactcgatagctatagaagttatttaaccccgagattcgataaaatctataaagagaataaaatcatattaatctatatacctccgtattcctcttatcttttatagcctctcgatatcggctattttacggtgttaaaacgctcgtatagccggatagttaaaataaaaatacggaacggaatcaattatatcgataaacttaatttcctcgaagtatatcctcttatacgaattaaagcttttaaattagagactatcaaaaatagctttcgatctataggtttaataccttttataccggagatagtgattttaaagcttaatattcggcttcgaacccctacccccccctctagctagggtagtgattaggatctaaaaacgccctcgaactatatctagttataaaagcaagctttgtcaattaaagtattgcttcgtataagattaagaagccccccgagcccgcttaattccgctataaactaggttttaaaagcctactagattataatacaatccgctatattactcgagaaagaagtgagcgatttacgcgctaaaaatgagaagaaaaagcaaaagcgaactcgatctataaggactatagtccacaaaggggatctcttagtttaggatattcgtaagctacgttcggagccatttaaggcctaagtagcgcgtattaataactatcgtgagtaggtttcggaaggtttaagaccgcccccctaggccggacgagcatgtggaatatataggaagctagggcatagaagagaaacatgcccagatagatgatgattttagtttatttaatttaatggcgttttggttgagataaatgcatttgaaattagtatgttgggtggggtggccggctcgcttgtgtggccggctcgcttgtgaaatacgttaactacctatgtccaacctgaaagacaaggcatcaagacaaacaacgggcctggggaaggacctgcatgggggacaatggggtcaagcagtcattccggaatcagagaatgtcgtgaatacccatgtaaacgcaaatccagagcttgtcttatcaccagcagattcatctgcacctggcgacacctgaaagccctcgagatcgttcggcagcctcgaagctcccaaatcccgagattcccgttgttggttggagacgttctcaatgagacgttgttggtgaaaaaggcaaccagccttggttcggttaggccatagtgtcctcatgacggcatttgttgcgaggagggccgagcgggttcctcttgggcagagaagtgcaggatatatccatccctggtatcctgaagggaaggacctcgacctcgtgagatgagatgagcgtggtgactcacctccaccggtggcccacgggtaagcagtctgggcagagcggagtaataggtttgttgacgacactgtcaaacgaagtctaggatcactttgggtctcatcatcatgtgagtaatctctgatgaatgtcgatttacctcgtcagcttaggtgagacatagtgccagaagatgtggaagaccactctagtggccatggcacatccgccaaagaatgggcaaccttggaaggaaggctgtacctggagaagatgagggatgaagaaagaatgggtcaggggatcaaaagtgaggaaagagctaacgacagcgaggaatgaaagaggtaggtacgaaacaaactacagaagttacgttccagttattcaatgtttatacctctacagcaaccaatatggctgcatgtgatattgaaagaagtatatgagctacctatgctgtgatagtatgacacagcattcatgcattttcttatcatcggcctgcggcgatagcaaaagtcaaggcgactcttcacccaacccaaacattctgatagaattgttccacgcactggagaggaaaaaggagttagcatggagccgagtatcggaacgagtcgacgaaatcttacgcttcgcaaacttcctccacggtgatacccttgacgctagcaataacatgagcaacacgagcgatggcaacaggctcattccggcccttcaccatgcaccccttctgccatttctccttcttcacggccttgggcagatccggtgcaccgtttaggtgctttgcagatgcatgagaagggcgaatttcgcactaggagaaaggttagtcatgatccggccaaagctcagagcaaagtacatacccatggcccatcagtttcgatttggagccgatcgagtggaatagctttgacaacctccaggttctcctcggtcttcatactacacccgttgacaccgacgtcaagacccagcgcgatcatccggttcatttcatccattgtccccgtgaagctgtgcacaagtccccgcttgggaagcttggcaagccttggggcaaggagtctctcaaagtcctcgcttgcagctctggagtggaggaataaggggagctgaatctcaacagccaggtccagttgggcctcgaaatacttgagctgaggttcctttgggctcaggaacagtcggtcataatcaaggccgatttcgccgaatgcgacagcatgaccggattgtgtggattcaattgccagagcgcggagttcctccagcatttttgagggaccgcctgggtattcgtcgaagagctttgcttggcatggatgtactccaacggttgcataacaaaagcccgctgcagaatccgctgttagtagacaaagggaaagtcctggcaagttcgaaactgacggtatttgctggcgacattaacagcgtgcttcgattctacgagatctgagccggtcaccataaactttgagcagcctacatcgcgagcacgctggacgacgtcatcgaggtcgtcttcgtgggcctgctttccatgatattcaccgcggaaaacgggatcactcaagttgataccgatctatgatttcgcagttagccaagagttgcatagcctctcgatggtgggctgttaagaaaaggcgacacacatcaacatatcggagaggcttaggttcggtcatatctggtgtggtctgttgtcttccagttgtggagactgtcttgggactcccagcagatatggaatttacaggggacagacccgccgagctgtaactcttatgaaaacctacgaaatgagtcagcttaagcttttcaaagaccacccagcctttgcatcactggactagttgataagtctatatctggacacgggacagacctaacgagacaggtctatatatgcctgttgaccgcacactcgaagtgatattgcggcggaaaagtctcaaagcacaactgacggtagagtttattcgcatcagatggttcgactagagatccttgttattgtgtcgttgaaatgccccagttcctctgtcgagacaaatgtgtgttgactcacggtcggaaaatgttcagccacactagggctgaggcttagttacactgtggctggtggtagttgatgcctgaaagtccaggcggctttattcagggaccagggacccactcggagggaaatccgtggtcccctcggtgcctcgccgacttgcgacacctcggaatcctcggaatctggatgttttcaaattggagtcattcggaactcagattaaaatccagttttctgtgctgcttattatgaattcgattggtctttggccttttgtacgacaaatgtgtgtggggttaagcgggactacatggtaaacaggttgactggcaatctagaaggccggataatcctgaagacaagcaagaccaagagttcaaaaatagaagctccaatacaacacacagcactccgtacagaagctggatgcttgaacaggaaggtcgggggactttagtcggtgcaatccggggtaagtccggggccattgccgagcgccatccccgcccttgctgagtatttagctggccgtggctggctgtttcgattctacctccacctcattaagcctccttcacaattccacatacaggccccgcgtgattaagtatcggtctcgatttcttcctagctaatccaagaacccgcacgcttacaccgtctgacagcaatggcagaccaaagactcctgtctgcccgacagatctcagagcataaaacacccaacgactgctgggttgtggttgacaagcaggtgtgggatgtgaccgactttttggaagagcatcctggaggatccgcaagtacgtccacgggtccgacaaatctatcatctcagggcgatatctaatctatctcgcgaatagttatccttaagcacgcaggaagagatgcaacggaggcctattcagaagtccacgcacctagcgtaatgaagaacaatctcgacccggagaagtttaagggcgtcctcgacgagtctacaattgacgccgaatgggctaaaccaccaccgggacagagtcccaaggtggtactggaaaacgaaaaaccgccgttggatacgttgattaactcacacgattttgaggtcgtggcttctaaaaccgccagcaagaagacctgggccttctactccagcgcagctacggatctaatcacacggaacgccaataaatcatgctttgaccgcatatggttccgcccacgagtcctaagaaacgtccgttcggtagatgctgggacgaatatcctcggcgggagttacaagctcccactgttcgtgagcccggcagcaatggcaaagctgatccacccggacggagagtgcgccattgccagagcctgcgcaaacaaaggaatcatgcaaggagtgagcttatatagtgtattttcattgtcagtcactatgcttacgttctggatagatatcaaacaactcatcatacacgatggaggagctacgtacgtcagcaccctcagccgacttcttcttccaattgtatgtcaaccgggaccgagcgaagtccgccgctctgctgcgccagtgttcagcgaatccgagcatcaaagctatttttgttactgtggacgccgcgtggcccggcaagcgcgaagccgatgagcgcgttaaggcagacgagagtctatcagtgcccatggcgccgtcaaaggcgcagaacgacaagaaaggcggcggtctcggccgcgtgatggctgggttcatcgatcccgggctgacatgggaggatttgaaatgggtgaaacagcacacgcacaaaccggtgtgtctgaaaggcgtgatgtcggcggacgatgcgctactagccatgaaagcgggacttgatggtatattgctcagcaatcacgggggtcgcaacctagataccagcccgccgtcgattatcacgctcctggagatccacagacgctgtccggaggtctttgatcatatggaggtttatgtggacagcggcattcggcgtggaactgacattcttaaggcggtttgtctgggcgcaacggccgtgggaatgggtcggagcatgctttttgctaccaattatggccaggagggagtagagcatttgattgacagtaagtgatggtttggtatcctgcttttatagtttgctgattcatgtttgtcgcagtcatgcaagatgagctggaaacagctatgcggaacattggcatcacatccctggcggaggcgtcccctgatcttgtgcacactggggatgtcgaccacctagttccagcgtcccgctcgcatccgtacgctcaggccatagctaaaggacggcgactggggtcatcgaaactttgaataaaaaaaaggttgggtatgagatatgtacatttgtactgggattgctatgtcggttgacaaatcccatagcgtggggatgcgagccatgtagggccatacagtatgctagaccagttgctcgacatagtagtaattagcgaccaatatacggcatatttacctgcctacctaccaagtctagaaatcaacaaaaagcaatatccccctccaatctaggggtaaaaggggaattattcaaccaattcccgccaagattcatcgccacttccccagggcgggcccttacagctatcgaatactcccgagcccctggtcaccaaaacaataagcatagccacttataaccttggaaccttccaaggcaggtctgctgaccttgacatgatttcgatccggaccttccgggtttaataagcgattgcggggtgagaaaagcataaatccgaatttgaaaacagacacgtagcatcatacgtagtatgttgtggatgatcatggacatctacacataatgacttataccgtgtagcacagagaatagggaaaatgtgtactccgtactccgtacgtactttgtagatcattcggaaggcggacccaactccggatctcaccgctccacttattaaaggactagtgtgacactaacttgctgaggtcttggaatattattcctaaaattaattcgaggtccatcaggtcatgggattcctcaacaatcgaggatcggcgatcaagcggtatcccccaaaattgaatgaaattccatatgttttgtggcttacgtgccatcaggctgtggtgcagaccgactcaccagtcgagagagagagaagggtgtgagagcgaattgtaggagccactcacgatcaggggattagaaggcgatatgcataacggaaccgttgtgcatatatcttcgaatcggataactctccccgtttttttcactttccctaggagaattcaatgaggggggcctacgttgtctagagtatgggcaggttataattaagtactccgtgactattcaacagattaccccattctgcaggaagatacccaataatggccgatgtctataatgctggtggttatttcattggatgatcatccaaaaaagacgtaatgatcaccggtttcaggagagtcgggagaagaggggtgagatggaatattcagaagtacggagacaaccttggaagtcgagaatacatcattttcggggggtaagtgatgtaccgggtacatcttgtcactccgtgttctggtgggtacggggtagcccacagtcccgatgactgggtacctggtacttacgccgtagatctgtgtctgggagaattgttgaactcagcacataactagcacatgggtagtagaaatgtatatatagagatcctcgtttcccctcttgccagctcatccgctggaaaattctgttttagctttcaaatccgtgaaatcacccactgctaccctctcagtgttgacgtgctctacttttttttggctcgacactatcgataacggtccagaccgccaagacgtggactcatagctctccccaaccattcccagctctataaagctgcctgtcctcttatatttgcatactcccctcatttctcacttcctcttttcccttatacttggagacctctgccccttaacttcgcaatatagctctatctcaaaaaagctatacatctatacacttcacaatcacaatgactgctccccgttcatcatctctccgcgctctccgtgctctctctcaacagcccgtggcaccctcttctcgccgctgccttcacatcaccggagttcagtccgctcaacccgccaacaacggcgagaagaccctctccaaccatgatgtcctccaatcccgcgccttcagcatcgccatgcgcagaatcaatggcagtgcattcccagagtatgtcccacattccatccaatacatctacccatgtctccattccaacctatcaaaaaaagtaacccccaaaactaacacgctccagctcctcttcctcacgccaattcaacacctcccgcgccacaaaagccctaaatgacacctcaaccgtcgacttcgtctacatgcccaacatggcagacctcgacgccgcccctctgcaacgcggcatccaagtcccggtccttcccgaactcccctccatccaaggccgccaaacacccaccgccccacccatgaagccccagatctacaccgtgtccggcaccggcgctgacgtccctgctagcgccatgagcgaggtcgtcgataaccacgccatcgacctggacccgttctcgcttaccgaggccgtcggccgctcacgtgtcggcgaggagatccagcgcaggtcaaatggttcttctgagcctggcgtcatacgtgagctttgggctgggttccttgatgatgttatgggtcccaaggagagtgtgcagaggaagtagagtcttttgattcctgtctctttggtccatccttgttaccttccagtcccgttgacgggtctgtgatgaaacgaattctcttgttgcttgatacattgttcaggctttattttgtcctttcctgtttggtcatcggactgttttgagatactagcgttttgatgtaatatctttcccttggagtggatgtcttcctccagtgtcagccagccgatcgttggttttttcctcttctatcttattccactacggctctgtcgagttgtgtcaatcaattgaacattactatccataccatctttaacaaaagccttggcttcttccattgacgtctcttagaaagatcgccctgtttgtggttcaattccgtctaatactctagtgggatacagtaagttcctgaggataacaatcgaaaccgcagtgactctttccgtgcattcagtctgccaaattacttccaaactattgtcacagatgactcaatatctctctgaaacaaacccgaaaattcccatttttcgttgtgccgaggcactcgatcgatacccaccatgatctacaaaagtagatccagactcccgggaactcctccgttaatcaaagtgcaccgttgacccgaggtcaccagactacctatatctccagcgtgagtcattcttttacttcccaagatccacgccgacaattgcaccacggtccaccgacgcatgtgcgccataccgagatgtgtccgaataaccctgaaagcgataattctaaaattgacgttcgctgtatgctccgacccgacagcgcttgtcttatccatctcgggacaatgacgtcgggatacccatttaagaagaaccggcgctagcataccgaatctagcacgagaatcgaatcagcccattctcttttcttccgtgtctccagcgccgctgcggtaatgtttttgcgggttccgaggtttgtttctcgttccttgctatctgcagttgccggttaaaatagatcggatagggctcgggtgtcgtggggaaggtcggagtcccgctcgggctatttcggggagagctggggtgattatctgatcgatttatcaatcgcttttcggggagtctggagtgtgtcatgtgataatttttctcctttgacgatggctattgtttgtcttttagtgttggggctatatgtggctggtcatttgttgcccaggcgttttggccgtaaggggtttgtggctccatggcttgatttgaatcgtgatctactgcccagatggttctgtgcctttggtggcatagatttatctacatcgagtgagccctccagttccctaggcatagagtttgattccttaggttgtcatcttttagggtagctatgtactattcactatatggccagtcgcgaacagttcccttcctcaatgggcccatttagccgaactaaatttatacaactattctctcgccccaacatgttaaatatcatgactctaagcaaattaaggtatcgtcatgtccaaaagtagatgtggatataccgaggtgctaatacctggtgcacagtgtgggactattgtactcccgtagcggattttgtgtcaagtagtgtatacgttcaatgcggtggctgtgatgagacaggtgcaagacattgttagacttgcagggtttgtatgacatgtgcactcgactgagatatgcagtacgtacggagtagtacggagtacacggaggatcaagtacacggaggatcacttcctggtaactggcttggttcataagagaggcagggactatccagcttctaggtgacagagccaacactcgccccatacactatccgcgcaggttgtgatgcagcaatggaaactcctggatatgttcggttttagagtcagtctccacagttaggtcatgatctacatgatatatccgttttaggcctcccactgttatactttgcaattaattggaccaggtcaaactgcgcaaagtgcgtactctagctattcaattttgaatcaatctaaattgtttatggaatgacttggagtaagtagacacaggtatctgcagagaaaaagtggtccctgtcaaggctgtcaggatcaaacggtctcgacccaagtggaggcggaaatctgagtctagacctcatgtatacacctaatagcgtctgtacaaagtacggttacattctatagcatacgtatgggctggaattctatttgttccctcttttcgtgttctggttttgtcttcaggtgtcctatgaaaaagttcaatactaagctttttagcgatttaaccacctaggtacatccatggatgtacttcactccttagtttctaatgttactatagactgtgagtgtcttcgcaccccgggttctctaaagcaaccacagtcaatagtattaaaatagagaagattcaagattcaatatcaatattgtatgatatcccgtccaagttccttgatatagaacatttggctccactagcttcatttaataggccgatcgatacccgaaatggcgttagacaagtggaggaaggtggaagctaatcctattctggtttagagccaactggtgttcttgccaacttcttgttcagggggggttttcaacggtggagaccctgtcccccctcacatctttcatggcacatttcgagtctctccaacctcctggccttttgttcattacttaatatcctgtcttttctttgtttttttcttcttcaatttcactctctatcacttaattcaactctacaacttcgcgagtcccccaattcctcagcttcatacagcgaacagcggttatattgaatagagagacatacaattgaatccagcttcaattcgtcaaatgcaggcttttacattttctatctaaactcctcagggatcatgcgtctgtcatcatgtctggtcttcattgccggcatctcaggcgtgcacgccttctatccatgggaattgcggatgaaactctccacggaaaccacagttaaacgtcgcttcgtcccgtggaccttgattggagccaaatccgacgacagcaccgatagcaccgacacatcaaacgcagccaacagaaaacctttcacccttgacctaaaaaaagtgccggttcgccgcgaccatgtctataagatcgtcgagtcccacaaaccgtcattggcagacagtgcaccgttacaccaggacgggacggattattcctacttttcgccggtctatgtaggttcccaaaaacaagaaatgtggatggcaatcgatactggagcccccaatacctgggtcttcgactcgaaatgcacggagcctgtctgcatacatcatcacactttcgaccggtctgcatcaaccagctttaccaccgacaatttggctttcagcctcttttacgggagtggcaagatcgacggcaagatggggaaagacaccctctccattgcagggctcgaagtcttgcaaacctttggtctagccaacaatgcctcggaaacctttgagagttacccattcgacgggattcttggcctgggtcggtcgcatacatcagggtggaatctgccatccttcatggatctcgttgcggagaaaaagcttatcaaatcaaacttggttgggttcagtctctctcgctcagaagacaatcacaaggatggggaaatcaactttggtgatgtcgatacaaccaaattcgatggcaccatatcctacactgctaccaatgacaaaaactggaacatccccctggatgatgcttatgtgaatggccaaagctgcaacttttctggaagaaccgctaccatcgacaccggcactacctatctcctgatccctcccgcggatgccaaagccctgttttctctagtccctgactcctctcaacagcctgacaacccgaacaactatttgatcccatgtaactcgactgccaccatagaattcgagttctctggtgtcaagtataacatctcccctaaggattatgtcggaaatccggagccggaaggctcggactactgcatttcgaccattgtcggctacgcatcaaatggtgcagactggctcgttggcgatgtctttttgaaaaatgtctataccgtcttcgatttcgacaatggccaggtcggtttcggcgcgctcgcctcggcctcggcctcggcctcagccttgaagtcgaacttagacccatcttcaacctcatcctcttcatcctcgtccccgccccaaggcaatgggacattcactgcaccgctagtcactggaactgctgcgtctactgctgacgccacgtcatcatcatcaccggcctcctccgcaatggccacagtatccggcagctccgcatcccacctcgtccacggcattagctggtctatgctcacagtcatgattgccgcattcgctgtttgaactgcattttagctcatctttcacttcttgcatctttttttgacttggcggcaatcatattttgccctttgtctcaatgtacactcacttatcacccctgtcttttccgtgcatatcgattatcctacacacatctcacttcactgctgttgataccttcgttaatacacccaggtccacatactaccacccacccattctaccatgcattggcggcactgtctattcggccttttttcagctgcatatatccatcgtttctgttgaataccaacgtgtacccttcgtttgaactggacatgacttgttattaattccatttagatagacaaaagtctaccttatcattggcaagatgctacaatctcataataaacagttaccaatttgtaaacgtgtttgatcagtgccacttttacaaggcttctatatgaacttcctatagttaactatggattgggcaagtgaggtgcgacattgagagggaaggtgcaagtcagctgccaacttgaggaaggtacgtgttgctgggggtataaaagggctcctctcacctttcttccttttctcttcttttctcttcttccttctttctctcagcctcccgcctaccgtctctccgtagcccatgagatcgtgtaggcgaggcaaagggccgtgcatcacctatacataaagacgtcaacattaccaaggttgttgaggtccatataggtccacacccaaatcaaaccaggctttctcgtggatgttctttgacaaagtcgtggctccatagccacttgacgggtcccacggaatacatggggggtgttaatcacattctcttcattatacagctagtcacctaggtagtcactgaatagatttacagccgaagacgtgtagagtaacaagcagtccctgtttacgagctaggcaatgctgtaggtgaaatcaaaagcagcatccaccccggaatgtcttccattcacaaagtcttctgtggcatgagcgtataattcttcggatccgactctgtatctcaaaatcagcatccatccttccaccacacacagtagacaagactgaccaagaatgtcccgattgaaatcctcaaccccgttgaacccagcaacacccatcagaatatccaaatccgccagcaacgacttcataacatgcctaaccccatcctcgccctggatactcaacccccaaatccaaagccgtccaataaacacaaaccgcgccccaagcgccaacgccttaacaacatcactagccccccgaaccccagaatcaaacataacataaatcttgtccccaaccgcctccgcaatcctctccagcgcatcaagactagcaacagccccatcaacctgcctcccagcatggttactcacaacaatcccctcaaccccaagcttaacacacctcctcgcatcactaacagactgaatccccttaataacaaacggccgtcccccactaatccccctccaagtctccatcaaccaaggaatcttctcccacgaccaagcccgcccatgccaaacagaatcaatccacttcgtcgacgccgcaacaacatcaatatcaggatcgataccatccgtaacacatctcctccgaaaaacaggatccgaaagccccacatccgccccgaatccgcggtagaacgcatagttcgacgacgcaacgtcgtcatgtcgccatccgagctgccacgtatccgtcgtgagaatcagtgcgtcgaagccgttttcccacgcccgtgttaggagtgagaccgttacctcgtcgtcgtgcggcatgtacagttggaagaaccttgtgcctgttccgtttgccgaggcgactttttcgattgacgtgctgccggctgttgagaggcagtaggggagattcagctcgctggcgacttttgagaccgcggcttcgccggctgggctgtagattttgtttattccgattggggcgaagccgattggggcggataccgagtggttgaagattgttgtttttgttgagcggttgtttgtgtcgattagttggttggggattagtcggtggcggtagaaggcttgtcggtttgcgaggtgtgtgtttgacattcctgcatttgaggaggcgtagtacctgttgcgggttttggaggttagtttatgtgtcttgggatatctggactgctatgatggggaggtaatatgtaccagccgccctcgctcagcttctctttagctctttcttccagttttcgggggtctatggaagttagaatttctgcaggttttaggaatcatagtgaacactttcctgtattgaacagcggtgtcgttccttcattctgtttccagaagttctctcgctggtaaagagcccattggggtgtggtacgctctttgatatgtgggtttgttgggtcactcatgttgcaaatagatgaatccttcttgatcccaggttcttcaattcgaatagaaatagaggtaaagagctagttgtgctcaatgtttgaagtgagggttatagatcaatatctcatcgatgacctcattttgacgtttggccatcagaccccgggagttggttaagcttaaatgaatttcaagatagaaaccatgggttacgatgttctcttcacatttaactagctccttgcagttgaacgtattcgatttcaaccttggaacaccttatgaagtatgaccagtaaggacgatttctcatacccttacagatatatgtatatcaaaatccggcgtcagcattagcccgcttaacagaactacccgattgtgattatatctagggccctcatacacttacactttgctttagaggccaccttcagctacaaaccgcatctacagaacaatatcaaaccttcgatcgggagcgatgacatcgcttttcgtatccgggccgagaatcgccgggggctaaccggaccgggtacgaatacggtaagcagcagtgaccatgagagacttaacccgtagactcatgagttctcactccaacccaagagaatatgtaagctttggtgtattttagctaggccaattgtcttcaaagccagctgccatttggataaactaattgaatcgagtacattgccagttaccagggcggtcactttctgcccagccaccgggtaattaaatctcttttggtcactaattcgcgctgtatacatcggatcctcggcatcgtcaatttgttgagcaggggtaaagtctactacacttctatctcagcttggtttcccttcctttgacaacacaatgtttggcctcagcagaagatcagcgcttgctcgctcaaaatctttggctgcgctgcccgccagagcggcagtcgcagctcagccatcctgtatcaacacccagggcttccactcgacgccatctcaggcagcgtcccggccgacgtggatgcccatgcgtgtcaagacaccatggattgaagcattgacccaaattcgcgaggcccagaaggctggaccacaggagaatgctggccagagcgttaagcgtgatctctcgccaaagaagatgtcagatagctattacagtgctgtacgcatgatcttttgtattggtgggaaatcagtttgttgatattgactgattggtagattttgcctttggctcaagacaaatggcttctggattcttatctcaacgcctccgggcatatcaggtacgtttttgatagcctacttatcaaatgagcacttgactgatcatttctagattgggctctcttctgatggacctcgatgccctagctggcattgttgcttaccgtcacacaggtgacggtgtatccactgtcaccgcggcgtgtgaccgaatcaccattgagaaccccctgatggaaatctgcgaccttgagctcagcggccaatgtacctacgcgacaggtcgatcaagtatggaaatctctcttcaggtcaccaaggcccgtccggaaggacaggaggcgaagcctgaagacatcctgatcacttgtgctttcacaatggtctccctggacccggcgaccaaggcgtatgttccttcattatcaaacgatacacacaaactaacatcaaacaaggcccgtcccagtggctcctcttatcgttgaaaccgaggaggaaaagcgcctcttccaaaaaggcgaagcgaattaccaagccaagaaggccctccgcacacgcagtctcctacagaaatcaccagacgacgaagagagcaacctaatccactcaatgtggacaaaggagatgtcctacctgagtaagcactagcccttctaccgatgaattgtccaaatacaacaatactaaccttcccagaccctcaaaacccagcaacccgccccgcaaaccaggtcttcatgagcgacacagtcctcaaatcggccatgatcatgcaaccgcaagaccgcaaccgccacaacttcatgatcttcggtggcttcctactaaaacagaccttcgagctagccttctgctgcgccgcgtccttcgcacacgcacgaccaaacttcgttgctctcgatcctagcacattcgaaaacccagtccccgtaggcagcgtgctgtacctgcgcgcgacggtttcgtacacggagcccgaggagcgagagggcgatagcactaagtacaccaaggttcaggtgcgtgttgactccaaggtgcgggatgttgagcacggcaccaagaagtccactggtatgtttaactatactttccttgttgagaaggatgtgcaggttatgccgaaggggtatggggagtttatgctttgggctgatgcccgtcgtcgggcgcagaatgctgctgctattgatcccgcgcataagatgagtgcgttgcggagtatcaaggatagtgttactgagtagatggggttggatggtttcttttgttttctgggttgggcaagatattttcccattagatttagatcggttagtgtttcgtgtgtttgaatatttctgcttttgtcttccaatggaacattagctacatactcattgagtttatatgatcagagtagcattcaatactaagacatctaccagtagttggaaatatcaaaatgaccaaaggcataaaagccatactttgtgaaggctaccatgcaaagagaaaagaatctatatacaacgccccttcgcctcacagttccatccaacaaaagtatgtataaaacgggcggggaatatatataagagcacagaagaacaaaaaccagggacataaaccgaacgcaaatattccagtatccagtatccagtattccagcattccagtattccagtccaccttgaagaaccaatgaaaccgactccatgtaaaaatgagatgagaatgatataagggatccttccaggccattgcaatgcaaccggggtaatacacagaggctgatcaaactgaaaaacataccagtcccgactataactccctttgccccccttctccttccgtggaaaaggaaaaatttcaaaaatgttcgtttcagatcgtgattccaggcttttttgggcctttggtggctttgtcaagtgtcctgtctcactttgccttttctagtatgaatatgagatttttttgttttgtttttgggatgagaaaatgttccgggtgtggtgatagtgagattgttgagtgatgtcgagtgatgctgtcttgttataacagatatgtggcggagacccaagtttcgaagatatttgatactcatcggtaaatccgaatgagtttagtctcgatccctcagaagagaagacacgatcgttaccacaaaggtgaaccatcatccaaccccggagtatgaactagcgaggaatgcaattaacagcgcagatccgcttgcggggaaccgtcttgcagccggatgccacaaggaagagctgatccccgatcaagggagacacaacctgttgattgtcattgctcgcggagaacttccgagacggcgttggacgtcaacggccctgcagtctgggtgccagaagcagctttatcctttggcccccgaggctcacgacgctccggcggctgctcttctttcatgcaagcattttccaagatattagtccactttccactagtgccagcgtggctatgcttcagatgctgtcggaagtggtctgcgcggaagaatttcttggcgttgttgcactcgccaaatttgtgcacggtggtcaagtgctcgaatcgtcgatcccagtccgcctgagggaaattggggaattcctccccgcagtacccgcacgtgtcgtgggtagctccggcatttgtttggcaggactgtgcgcctgaggggtggaatgctgcttggaaactgacgagcgcggcgcatgaccatgaatggcgtcggaggtggagggagttttgatggcgctcggcttcgtttttgttcttgaaccggtggttgcagtaggcgcatgcgtactgtttctccatctcgtgtgctctatgctaagttagtctgggtctgataatgaagacatctaggcgtcaacttaccgcaggccatctgggttgtcgaatttcttgggtttctttggacagcaatcgcagatgaaaagcccgccgatcttcggcgccgcgggctttggcacgttcataatggtcgtcggtacaggcacctttccagtggcgtctgtcgcaggtggttctaaagatgcgggtcctgggagtcttgaaagagtaggctgagatagcgctgcaggagggctggggttgaggattgatttttcatggaaagtatcgagatcggagctcggcgaaaaaccacctggtgatggccggtcgtacggagaaaggctcgtcatactgctgcctccaatagacagcgtagacgaatacgatcccgaggtccggatgctcaaggatgaggcggccgagagggttcgctgactcgtggggtagtggtagttggggttgacggatagtgtgttagtaaatggatgaccgctgagtcttcgctgagacaagtctccgttactcgtagtgacgtgcaatgtatgtctctcgtcgcttatcggctcacgcggaggtgaggatgcccgtcgtttcatgccctgcctagaatcgggatacggcggagtgggctctcgaagaatgaattgccgcgggggtgccagctcgtcagtcgaaaactccccctcgatatctgaaaacgcgccctggtcatagcttccacggttcgatcggctcggtaaactgatgctatcttctcgctgtggcgttgtcccatgatagcggcgtcggttcacatcccgtaaagatccttgatcgtaatccagtgctgatgctggtgcattgctctccacgcttgggcttcggccttcaacatactctttccagttgaccttggtcctgggagaaacacccccggactgagggctgttgtgccatttcacatccagcgttgacccctcagaaggccctggggatggcagattgcttgggcttcgtgagggaacggtgagcgccgagagcgaacttcggctgtcggttccgagactgatagatccccctggcgacggaggttttgccatttgaggcttcccaattttcgataataggtgttggtcgtaggcatttgatgagtctttcacgctgcgcagtgaaaattcgcgctcaccactcaagctgtcaatgtgttagcaagaatcaaccagatatagaaaagcgcggtactgcaaaaccgggagttgttcgcagtcctcgcacatcaagtgcgcttacattggacccgccggattgggcataaccgacatggcattcggaaatccgtctgtagctgatagaggcggctgaatctggatctgagtttcggggcttcgtgagacgggggctccctgcctcccctctaaaccgtctatctgcatcggatcaccctgtgaggcagttaccggccgtcgatggcctccaaacaggcttgagctcgggttgataggcggaagagaagtcggagtttgtgagtttgcgtattgccagccagcgtcatggcccatctccaaatcggggattatgggtggcggtggaagtggtggaggggcagtgtccatagtagtcctagttcgtgaagctataggtaacgggccgtgagatgagaatgccagctcgggcatagcgtattggtgtctgtcggaagaacggtgcctgtgttctctgaaatcatggaagctcgactgagaaaaccgaaggtccattctagaaccagaacatagagccggaatcgaaatcacgaactggtgcgcatccacatgaacttcaagatgagatcaggcagatacctagtaaagcggaagaaaaggtcgagcttgatataaatcggaacaagcaggtcgaatcaagatctcaatatcccagcaataacccaatccagttgaatgcaaacgtcggtcgtgaaaccagctccgattgttaagcggaccgttaaccagcctcacgatgaagagtcagaaggtccagcttctggttcaagagagaatagtttaatagagtgactttatgcagtgataaagtctgagtctaattttgagagtcagaatcatttgaaagtggacttgagataaataaaaggccggggtaaggagaaatagggctgaagacgacctacctcgggacccttgttcggcgattcgcctcataagatgaaacgttttcccgtaagtgacacacggagagccgggtctgtgtcccatagaaattggccactgcaattcaaggagatgcacacatgctgaaaataatatggagaaaacgaaaagaaaacaaaggaatataactagtagtgttagaaaggtgcgattaagccgagagatttcagtataaaagaaatacacacactctctctatgcaatgggggtaccccactagctgaagcctggtaaaaaaagggtgttaaaggtaaaaaaagaaggctgaaggctgagttggagagctggagagctggagagctgaagatcaaataaaaggcagaagaagttgaaatgcgcccagatcgtatcgggtaggaattcgggcggtgcaaattggatccaattcaggcaaagagaggcaatttaggtgatctcattcctcgaagggaggaaagtgaaagttcaactaatcagaggcaaagaggcaaaaaaaaaggaaattgaaacataccaggcttaaggcctttggctgacgtggaaggccgtatatgtatgtatcgtcggtatatgggtcatgtccgttacataccaattacagggcaaacatcatttcttttttttccacttttttctttttctttttctttttttttaaaaaagataatctgacattctctaattaaacattaaataatcccgtaatttaaatttatataaaaaaagaaaaatttgattggattttccagatctccgcgtggaaaagccacgtttgaatggcaacaggttccttttagggcacaaggcttagcgctaaaaaagactcggtaattttgtctccagatatattggttcgatacactattgtattagacatctgggtcccaagtactccgtaccttacgctatagcttctagcgaagacatctgggtctactccatagaacggggaaatgaatggactggcccagagtccaagttccagagttcatgctgatctatgtgacgcgccctaccccatatggagtcttcatattacttgacgggatcatggaagccaaccataacattgcagaatggccgtgcggccaaccctcacaggtgggggtctctcgtatattggacgcctcgcaaatgcgacccagatgatggggttgtccacatattgttaatccggatataacgctctgttcaatcttctcttggctatctttactccgtacactcattcaagaagcaagttgcatgccaaaaaaaaaaagggaaaaaagggaaaacacgaattttagtggcactgcagtgtacttacatactccaagttttttttaaaaaaagctatctcccatcttcggtgagacgaaaacggctttgacaatgcccaggaagaaacacgttcgaggaaccatggtttatggtcttctagaactggaacttgttgagaaagtgctagagaggggtacaggggtacggagtacaccctcctcccgagtcattgggagaatgaagtatagattggcattggtcttgtgtggtcttgtacagtttcgcaaccagtgataatacacacgggggggcttggaaatcttggcatttaggcttaatatctcctgggcaaggggcggcgacaacactcctgttgatggtttttcttcttttaaaacctgaacagtgggcaggttataagtactccgcacattgtacaacacatgtgcaatctcatggtacaataaacatacgacaagatcttgtgctgcatttcggaggattcggccctacattcattagagaacattcttttgcctccacaaaaaaaagcggacaatgctgagtcgttggacattgaccccactgatttgctagcgcgctccacttagcgcctagcattgcatgcactgccacactgccggtccgcctgtcattcgagcgcagggtgcgaattttgaatgtggtgtgatcaagcatagagtaagatatgttgagctggatttttgaaaaaaattcccagaaaatgacgtggtctttggagatgaacgtgaagaagagaaaagagaacgttggaacaaaccctccagggctgcagggaacagggctgagtaatcgggtgaatgctccacatcagcttcgagaatgaaaatctcaatttttctttttccttttggtttcctttttaggaaatattgctaaattaggtattttatccgcaaacacattagactagtgttactatacggagtacagagcacttacccagtagtctacgttagtacaatttatgtatgtaatataatggggtttcatcccaaggagatggtcgaactctacgttagatgtatacccctggagccctatcacacgtatgacgatcagatcttctgatcagagcatctaagtctacatggagtaatgattatctgctctcaagggagggttgctctacaagtacggagtacgttgctcaacatcaggattttgtaattgcagagtggcagtgtctttcttggcagggggtattgcctctatacatcgattcaccctccgtctgctccgtacacggagtacagagcggataccaagatcacatgtatattgtacagtctaatagagttttccccgggcccattatgtatgtatttctcatcgatcgtcgccgtcaagccagttgatgttccaggaagcgcccttaacttatttaggaaataattagattgcggtgggtgatggttgactacattggtagactgtgctgtacacaactccattgaggcgtctgtttccgtatttgcttcgggtaatgattaccagagcctacaggcagcaaagacaccttttcaacaagaggcgtcagcagagaggggttaacggattttgtacggagtggttcggctggcttcggctggcaaaacccagtctttgccctgaaactgctcctgaggcgcagccagccttaagccttagtgggctgcagcctagaagcgcgtggtcatgtaacgcggacaggctaaccaactttatagtatgtaagttatatccatactccatagtgaggccgtatgtggtatattgcctccggtcccgttcattgctccatccctgtcagcctagatccaagttccccgcggtaagcctaactaagcctaaatctagcttcctttttttgttgccccgtgagcacccccttgcaggtcccatagcaaatcagatcaaccctattatagattggctgtttgaccttcgttggatgtaaatcgcgctccatgttgcgagaaaccctcggcgagacttgggatttacaagtccagtatatcgactccgtatgcactgtgttacgactacaacatagacactctaaacttctgtacgatgataactgcgcgttacgtctacaactacatgtatattgaatgtaaaacataaagggcacgtggtcggcaaaatgaccttgatgtttggttgtgaattcggtgtctcacttttgggaaggcctagttaaatccctccttagaaatgtgtgcacttaatctaataaagtccttagaaggaaaatgataatactactcgtgacatatatgcaccaacccggagttggggagattcttatgcaatggcctacgtgccacgccatgcaaaactctacactctcttacagctctaattatgtatatttaagttaataaatggatttcaggtcaagagacaattatacaacagtattttccttgacacaaataaacactggtctgaaatatgttgtagttataaaaggaagtatggcctgaggcacccaagtcacctgctttgtcatacccttgccctatcagactttttgagtttggccgaggctcaacctccgcctttgcgatctaagagaagaaaagagtcgagttatcaaactggcactggagctgagcttcgaattctgtatttcctctgtcaccatcaacgaaacgtcttactgttgttgagtcgcatccaccatatctcaaaatggccatgaatcaaataaaaggccacaatatctatgtcggagggttggtctcactctactaacaaacaatccttgcccgggtatcgctaaaatggagctgagactcgagattggccatcaaatcctgatttagcggtttccattcattgctaacgcgccatttgtagcataataggcgccaaaaataaagcagcattggcacgtgcagatatcacgcatgttctctcagtgctgcgtcttaatctcaacctagccgaggagcaagagactttcaagccttaccatcatctttccataggagttgacgatgtcgacgatgaaaatttattggaacatttccctgccgctatcaagtttatccagtccggcctaaacggtggtggaggtgtactggtgcattggtaagtcagaatacatattttccagtctcacttgtggaaggtttctcccagattctcaagatacttttcgtcttgaatgcatattctcgagtggcttcgtgcctcctacgtcatcgcgtatccatcaagtgcgatctacacgtggcttgagaattttgcacatccttatacacgttggacccttttcctgaagatccaacaagctgcgtctggccttgcccatcatggaacgatgtacagtggctaatttgatgacccagtgcgatgggaaagtcccgctccgcggccatttgcatcgcctacctgctccaccggcagccgggggcactcacaccgcaatctgcccttgcgctgcttcagcaaagcaggcccctatgtgagccaaacgatggcttcatggaacagctgaatttgtaccatgagatgggctgtccagatgatgtcactgatcatcccgtgtacaagcgctggctttatcgccgcgatgtcgaaggcagtgtggcgtgcggccgtgccccagagctgaagtcggtgcggtttgaagatgaacaacccgttcagtcccaaggcgccaccggtcgaacagtcgaaattaaatgtcggaaatgcaggttagtcccacaattaaagatccagacccatactcctgagagtcaaataaaaaagaaacttccagatttactaatcccatcgcagaaccaaattggcgacgactccattcatcatcccgcatgaggaagaaaagcaaaacaccgccaagtcctcagtaaccgccgattgcggtcatgttttcctccaccccctgacctggatgcgcccaagtctcttcccatctgagggagctgaggctagcgcggatacaacatatggtgcgcaccctgacgatgcccccctctctgggcgcctcacttgccccaatcctatctgcgggtccaacgttggcaaatttgcatggcagggtctacgctgcagctgcggtggttgggtcgtgccagccatcggtcttaccaaagcccgtgtcgatatcgcaaaccaggtcaacatggctcaggggccaagagttaaccctgccatccgtcttcccccgggaatgcgggccctcgcagctaatgactctgggcgtggcaatctttgagatgagaagtgatgatcaacatacatgcatacatagttttacgagttatgaaagcttaaagctcctacatttgtttatcatattttggttgtttttgttcggttctagatgatcgtgtgtcaaccaagggggctcactgggcttgtcctaagtgacatgtggtacatctaagcttggacctgggagccactccacactccgtgcacagctgggtctattgagacacccactctttggtgatgaccacgtgccgcacgcggagagtgaagattgtcgctggccataagaacatgactgccttgcgtctcgtttcattctacatactccgtacaggcagcgacaatggcatagtgaggctcaagaacaccgcctccgacctttccagacaagccgctaaagctgacaagagattcccccatgctccatcccatgatctacaaaagcaagacacacattaggcaggacaccatgcccctgctgatccgtacagccgctgatatcaatccatctccaaacgcacaagccattagtcctcccgaaagctacctatccacctatcttgtgattcgtatccaaggcccccgttcgacaaggatgccatgtcccaccaaaaccatcttgcacaaactcaaagatagagtaatacagcgtcggcgatatgagacagagccaaagccccatttcgaaccgtacatagtaattaaactccagacgggcttaccttaccctagggctgcaccgcataccaaacgtgcatcagtcgactcgtggcctttgccttagcccttgtcttttttttttgggtttattttcccagggtctgatcctcgagccatatgcagctaacgcactccgtaacaggcacaaccttggaaagcaatagttaatcgcgcgccaaggacctgagtttctctagccaaaagagtagatcccaaatcagtggactaagtagactccactctttctttttcccagggaagtggccccactcaccgaagcgctgtcagttcgagttggatgtttcaaagatcagcgtaacgccaatgacgggattgacccaaatttccccccttctgccgacttccaaggtttgaagcagaaggaggctgtgcaaagcgggtctgtttcctggctttcccgattggcgggtagctgtattggtattaccagtatctgcttggtatgtgtttgtttactggggtatctggtatttttccataatccagcccttatatcgtccacgggtgttctgattggaagtttctgtactatacagtggacgtttcttgatgataatatatgtggttcttactagttgtagatctaattagtgtacaaaccttcattggttccgttgtttcgcaagctggatactttatgaatgtcactttcacattttgattggcaaccctttccttgtgggggtgggcagtgcactttgccttgcagggggagctcccggtggagttcccatctagtctggcttggtgacttaatgtacggagtacacgtcctttccacaaccatctttacatagtttatcaatgcggtcgtgatcgccttgcgtcgatcgctggcatttttaactttgtttcaggtttgtctgggattagggcttggtctcttggtatggatgagatgttgtatagcagttgcttatgatcaagtctaattaggagaggcctaagtactatcgttcgtgtctgggataaccccgtaatcgtacgttctcaaggattttgccattaaaaatagtactagtctcacttcgttcactatgtggtatctgtgcagctgtcgactattctgcgttgaacaagccttgtgtctcatggcgacattgttgtcaactagcgagctacgaaataggctgccaaatacttttagctaaataaagatagcactgtgcgagttacactgccttcgaagtttgagcagcacgtgcatatcttgtactatgctcacatgaggacaacatacggagtatctgcccatataccacagagtatcccggtataataatgactacctacacttatcattttagcttagcactatatatagcctttcccgaacgcatccaatcccattgtgctagtttagtaggccgcgtgctctctaccatctaaacctgccaggcagccttcagtcgatgaacatggcttgactagttcgagaaaggcacttatgattctctaacaattatagaccgcgtcacttccaggcagctgcgtcggtaattggagtcaaatcttcacgtgtctgtcccagctctaaaagcgaagtgggcatgtagttgtctatattgtgggctatatatagcgacttgcattgaaatagccccggacacgggatgagaatacaaagatcggtatatgtacgtaccatggtagtctttgtaccaacgggagttcgttcaagtatcacatgcatcgaatctcctatggccgcagcaaatacgccgtacacgagtagatgtttcaccgaagcccgggagggcacagaaaccgagtaagccgcccactagggctgaggcagttttgatgatgggctcgtggacggctctagttaattagtgcttattataccccacccaacatcacgaagtcacgcaatacgtgaagagcatcgtcggactaaggtatatattacaaagaataaagagcaaacaatttccggtctggagatatacagttgcccgggcgagagtggccgaggattcattcgaaaggcggactctcgttggacgcctcgttagacaaagtgtactaagaacaactgggttgcatggaagtcaccggcttgtagattttgctactgcagtcgaatcctgcaggatcagaaattcgcttattcgagaggtaaacatattccacatatacataggtcctaggaatgaatgtgccagagtcaggagcgcccggtacggggcgccaatgccacgtcgacggcttaaaccttttttgtcggctcaagattgtatgactcggtgatgattgggcgggacgcccgctaagaaagagaagacatatgtggggttatgaagcttgtgtgactcaatcttgcgtcggctgttctccgtaaacctccaaccgggtcaaaacatagggtaaaatggatgattcgataatcagcgattgacggagcaccagatatgccgtgcgaagtgatggacatcagttgtcgaacatgccttccctggtttgcatcgccttctcatcgcccgaagctttgtgccaggcagattggcagatgacgctggccgaaccaacctggcgttcttatctcgaactacctacctatactgacgcccaaagtatacaattgagcaaaagtctaaggatttcccgacggcacggagggaaacagcgaaggctgccttaatctttcctgattgcgtttcgccatttcaatattgcgcagccggtcgatgcgcatctgatagaaattcctgttgcgccgttaggagtcacttcatgaaaattatgcttatcacatacttgtgcaaagagaaaattcgaggcgaatcatctgactttgtctctttcccggaacctttctggatagaagcgatctggcagggagaatcagtcaacgcgttcatacaaaggattttgcttattgaccttcgctgtggaaagttacgaaccttatcatctctgtctttttcgtcgttggcatttgactcggatgtatctttgtctttgtctttgggctcatctttgcccttgtctttttcgtctttattgtccttgctagacgccttctcacgttctttcttccgtcgttgtttttcttcgtattctttttttaccttttcgatctccttggccatttcctcttctttgagacgttttgcctggccctccgtgtcgatgattggagagcagaaatgcttgtcttgcaaatgtgcggggcacacgtagaagaagtcctgaggagtgaattagccacttgatatacataaaaataggaaatcaagcaaagaaacagtctcttatactatgctctagatctcaaatcagattgcataccttgttatccggtgtgatcatcacactggttgatggtttgtaacaaatcaaacatgcttttgcagaggtatcggccacccgacgcacgtggtagacgtttgtcaatgacatagttataaaccgaaatgtcctaagctacgggaagtgcttcagagcttctgttgctgtttggaggccgtgttgaacaagtgtagatggactggatgaggttggtgttgattgagaaagtgccgtcatgtgacccatacttccaagagcaagtcggatctattgaagtctttacaagataattggaatccaagatgccgcgctgacggaaataaggcattgattcactgaagctgatattgtatttcagccaacaccagcacgcccatcttaacagaacgccggaccatgcatttgttcaccgaacaacccggtaggactagagaacaggacgagagatagcaatacatgaagttttatgaagagaaatcatgagatatagcgagcattaaaagaatcgcggcaaaaaaagagacatagatcataacaccccctccccatcaatgccggctgcctccgttgctagtctcaaatccttgcctgcgataccgatatcgcgcaagtaaggcctgaaggctgtcagtagatccttaagaccaccacggagtgcagcgagcacaatttcaacatctggaaccaggcgggcgactgcttgcgcctggggatcggtcgatggagggaagttgatatcggtccagtgggcgtccaacgcactctggtgggcaaatgcattcagagcgagggtggtttgggtcaggagtcgcacggctgagggcacatcggcctgaactttgccatacggatcttcggccaagctagcaatgaggagtcgagtcagcgactccacagcatccacaatcaaggacagagaggactccggtgtgccaagaacaatagcagagagacgttgagcgtatgtttgacggaaaggttgtccgataggcgaacgaagaatctgcgccagaactgggttcatgtcctcgggtttatgagttgtggagggactgccggtaagtagtttgaacttctgaggagagccgagggatttctgtttctgctcggggctaagcactgctgaggatgcccgatcgaaaacatcacggacccgggcccgggcagtaggagtccagtcttctgattgaccgaaggatttagccgccgagctaaacgcatcgccaaatttgtcctggcgcgaagtacccttcggggcagtggtaaagatattgccgtctttgattggttctgagagtcgcgggagagtttgaagaacaggctcggatttctcggcctgcggcaaaggcttggtaacaggcgcgggattcttgctttcctcgatgcgagtgttaatggccttgattacatctgtagtgcaagcaagaacctgggaccaagccgaaccaccttcgcgatcaatttcattgaaaattgccttccggcggtcgggaacgcgctggcttatgagactcagttcccagagcgcaaaagtcttcacaatttccttctttgccttgaggccactaagaagactgccattgggatctttggcttccgttgtgagtggctggccccgcttcaaaggctccttgccgatgaacacagaatagaagatattggcagtttgccaggagagcacaagcatcaatccgggagccaaggttttgaagaagaagtaggggaaaatcgagggaacgaagctatgaggttcggctgcagatctcgggaagctgaaaaagagcttggcgacgtacaaagaccagctccacgcaaagcctctgaaaaatatggggtatatcacgagtgacgctgcagcaacagtgacgcttctgagagccccggccactagttctggcagcagaacaccctgtagatacttggaggttggcggtacggggtgagtacgctcgtcatttgttttggagcttcgctccgcgattggcactgcaatgcggtcgtagtcgtagtaaaggtggaacactgcttgcacgcatgctagaaacgcatggaaggaatgaaggtaaatcggcctttcgttcagagtcggtcgctcgtgtggcctgtatcccattagtctaaatcggagtcatttgaaacatactcaacgcaccttccccgtttcacaagctcgaggtttgaatcactcgaagatgaccatacataaatcacagtgaaccaccatgccgagaagatgtaccagccaaaggtttgcgcgatttgtaacggagtgaaggatctcaaggtgccgaacgaggagctagctgttctcgagccaatgtgcatttggctgacccgaaggacaaaaatggtgagcgaggatatgaacagcagcgcggttcggacaccgcaactaccaaagggaaaccataaccagaaaactgcatagaatatttttatcagttctttgtacttcaggacttgaaactgagccttcgaggctcgacccgataaggttgcgatgtaactcacaagacgatttctccccgatcgcaattgcgataatgtaagagaccagcagtgaaagtgcagacgcatgaacaaatcttcggtgcaaggccgaagtcaagattcgcctatagggccgagtttgtacagcggccatgatgtaagcttgagagtgggatgcgctcgtggaagagaatgaaatagttgaagattagagcatgatcagaatgacagtgatatggagagctccgggagctggagaatagaattggcggaccagggacggtgtcgacgaatggtcacggctgacagctgattgtgttgagctggtcggatagaatcaatcaacggcgaggtccgcccaggaatattttgaggcatcataacacaccagccacatatagtcatgtgatatgtggctcaggtgtacattgtgccacagatgctagtccatatcgggcctaatggatgcatagtacgtcatgtgagggcggtctgcacccgtggacacccacgcagcttatcgaaggcagcagggacctgcagataactctcatttggtctccagtcttcttctaccttcactttaagcactcgtttattgctttctgattacacatagaatgtcttttgataggctaaactcgttggaggctcagcctaccactatgcgccgggatgaagacccgcagtaccgtgacgatccggacttcgaccacctggccgagcagctctcagatcagttatttacattgacatcaaacatttctcgcctatcgaatcaaattgcccttctcggtaccaagcgcgacacagagcgcgtgcgcgaacgagttcataatctgcttgaagagacccgtacggggtttagggatgtaggagaagggattaagcggatccagacatgggaggacgtcaatgtatgatccatctgattcaacttactgctggttgatttttattaacgtcccaacttaatagccctcccagaaatggacacagcagaagctatcgtccgaattcaaagccaccttggatgaattccaaactattcagcgtcgtgcactcgagaaacagcgcgcttctgcagttgctgcacgtacagcattcgaggaaggcgagcagccgtccgctgagaacgatgtccaattacaagagcagttattggaggagcaacatcgcatggccaaccagggcgaggtagacttccaagagtctttgatcatcgagcgtgaggcagagatacggaacattgaacaaagcgtgggagagctcaacgagctcttccgggatgttgcgcacatcgttacggaacaaggagggcagttggatatcatcagcgagaatgtccaaaatgtcacccaggacacacgaggcgcaaatgtcgagttgcgcagtgccagtagatatcagaagaatgcgcgcaacagagcctgctgtctgtttgtaattcttgctgttatccttgctattattgtgcttgcaattgtcctcggatagatatttctctttttctcgttctgttattggctaccatcactgtcttcgtctttaatgttgtcatctacgcgcgcgatatccctcttgcatgattacacttcccttagtcaagcatctcaccttttgcttcttttcattctggtacttctgacttactcattcctgaccgaacttcggtgtatgtggaatggagaacattaattcatcgctgtctctcgatcctgtagcctgatatcgtacagtaatatatgtgttgtacatgcaaaatacacccaatcgggtcccagatcctgcccgtgctccgttgtcgccttggtatgtgcagtgcgaaagcgtattccgccagaagacgatcatcaatgatgccttcataaaccggtgaagcggttgaatctcagcctccagccttcataagtgttcagtttgggccgaacatcgaggaagaaactgagttttcccgggttggcattggcattggcagccaggcctgatggtgttccaccattgcctccagacggcttgccctggtagaaatcgataacgtattcaattctttcaccgccacaacgctcaacaacccagtcatgccgatcaaacggatgctggtagccaagccatccattgattcgtgcacgcggactcaggtattttggatcgactccaagtccccggaaagaatataattttggtcctccacatttcttgctcccggggtcagacgaggggccatttctctcccattcgaggatttgatcccatgcacgttcattgacagcattgtgaatggggataatggaggctacggaagtcgcaagctctgaagccgaggcagtcgatccgggagtgttacccttgcgcatcaaggcttcgaaaaactgtttctccgacggatagatccaatttccagtggtttcatcacggccagtctcggattcggcattggatgggctgccatgggacacagcgtatggggatgaagaacctttgctggcctccgggcaagcacttgctgagctgaaatcaccagctcgagggatagtgctcacttcccggtctgttgataggggtcgttgtgatttaggacgatgttgtccctgttcggcagggacatcggaggtaggatgaggtgagttgctattttgttgcaaccagatctcacgggttttgtgatccacgggacaagttgctggtgcctctgcggcgggggcagagggcgtacttgctgcagctcccattgttgaataattggaggtcaatgactggaggagctcggcgcatcgacacggaactagaactacgccgtagaaattattttgccccctcaccgccccgataaatcaacaatccccctaagtagtaaatctcccctcgtgtctcttatagttctttagataattattgacgttctttcttctatccatctgaagcaaaaatggcgtctacatcgaaccaatctatttaccgggccaccaccaccgctccggtgaacattgctgtcatcaagtatgccgctcttcgattacccctcatcccctttataccaaataggtttgtgctaatgaaagtgctctagatactggggcaagcgtgatactactctcaaccttccgacaaactcctccctctcagtgacactctctcagcgctctctccgtaccttgaccactgcctcctgctctgctgcatacccacctgcggacaccctaaacctgaacggcagcccgcaggacatccagtcctccaagcggacaatggcctgtatctccaaccttcgtgccctccgcaaggcccttgaggatgcggactcctcgctccccaagctctctgcccaccctctccggatcgtctccgagaacaacttccccactgctgccggtctggccagctctgcggctggcttcgcagcgttagtccgcgccgtcgctgacctttatgaactacctcagtcccctaaggaactgagccgcattgcgcgccaaggctccgggtctgcctgccgctccctgatgggcggatacgtcgcatggcgcacaggcgagctcgctgatggaagcgatagcctggctgaggaagttgctcctgcatcccactggcctgaaatgcgtgctcttgttctggtcgtcagtgccgagaagaaggacgtgcctagcaccgagggaatgcagaccactgtagccacctcggccctcttcgctgagcgtgcccagaacgttgttcctgagcgtatggccgccattgagaccgccattaaaaaccgcaacttccacgacttcgcggagattaccatgcgggactcgaacactttccacgctacttgcctcgactcctggccccctatcttttacatgaacgacgtctctcgtgctgctgtccgccttgtgcacgatatcaaccgtgtcgttggccggacggtttgtgcttacacttttgatgctggcccaaatgctgtcatctactatgaagataaggactctgagattgtggctggtaccgtcaaggctattctgggccccaatactgagggttgggatggtgtattctacgagagactggccaatgtcaccgctggtgtttccctggatcaggttgactctcgcgccgtcgaagttctgaaagatggtgtgagccgtgtcatcttgactggtgtcggagagggccccgtcaaggttgaggagcaccttgtcagcgagactggtgagatcctcagcactctttaggaagtttggataagctataccggacaaccggtatttccattttggccaaccttggaaggtctgacagcctgaaagataccccaccgttcttgtgcggacaattccacttggccatgcaagcttgatgcatattcctttcactgtatcttcttttctctctcataatctagaacataatcataccatggcagcggggtctcggtttacacagcatatctgcttccattcctcataataatatatcttggacatgacgcaatacgacacagcacttgcatgcaaattaatgaaatgttcgcttccaactttaaaagtccaatatctgtcttagtatacttccatccgacgaatatctcctgcatcctctcaacaagaacgacaatcatcacagcgcctgaagccaaatccgagtgtcctacaattctcaatgaaagcaagttgttcgttgttggcataaacacagcaaccagcaaatccacagccggtatcattgaagcttccaccagtctggacacaggcagactgagagttctcagcgataccctcgcaagcgcatttgatagacctgattggcacttgagcagtcgctagcattcccaagcccaagagggaagtgagatatgttgagaaagagaggtgcatagtctgaatcgagacattaaggaactgacctcagctaacagataaccggacaggttcacttacggttcttgaaaaggaatggccttgcttagggcttttcttggtatcctttcttggctgcagtcatgatattcagatgtgggatatggtcttttttatatctccatcctggatactttgtacacaacgtttcaatcgacttgacaactagccatttaggggagcacaacatatgtctcatttttgcgtcatctagtgagaaaactgtgtctgttgtacgactttatctcgacagatgtagtccatagtatctgacttgattgctccaggtatgggatattccccgcaatttagagtcacatcactaacgcttctctgtatatgaatgacgatagttcacttgtgcaacattatgtagacttgcagttaactctttgcgggtttgtgttgaggacctgtatacatatataccttcgatgccatgaatcgaactacctcagtacaaagaaatatatatatttcacgtcctgatatccaaccctacagactaagcacttattataattctaactacgccagtacaaatgcaaatgcaacgttagaagaatgagcttacgggccccaagtgtaccatattcagtctgttgcgaaaggatgtccactgtgaaaaggcaacgtttgggcccagcctttgtcgagaacagcctgtcgcggagggtattatatttcagttatgcaggtcacgtatgactcgcagaacacaggacagggacccttgagttatctcgtagaaagctgctaggaagtcatacaagtgtaacccgtggattgaagtagatactctccataagaataagaactctgtagcgtcgatgatccgtgccaaaagctgaatatccctttttgtgttcagttcataagagagtctggagaggcctcgtaccgtttggaatccatattgagacggacgttgaatatattctaggtcgctttcttaagctacgtacttttagctggaataattagaacagaagcaacttttctttttcattcatgatgtagatgctaattggtacgtgcagtatattcatcgactgcttcacgccagcaaagaagacttcttcatttccttgacggtagggatctccttaacgcgagcggcaccaccaccctcaacaatggctatactctctttcaagacgccagcacctctgcctccgtacataggagggatggtaggctcgacatcattttcttcatcttccttgtcctcgttctcggcagtggggggaggaacttcaaatacctcgtcccggcaatctgcgcacatagtcaggacttcctgcgatgccttctcgatagcagctgcacgctcacgcatgccacgacgcagcagagcatcgacaagggtctcagtttccgccacgctcgagttaacccgttcaatgagtcgtcggatactgttgacgagatattcttcttcgtaaacggtgcccttcttaccacgagcacgcttgcgttcctcgcgtctgcgagtcttcgaagtatgacgtgacattccagttttgcctgttttcccggtgttacccgtgtaacgggtgaacatggagcgaccagcaagcgtagatgcatctgtcggggccagcgagacgttgtccgggatatcaacgcccgcgtctccaccagtgggatcaccaccaaagaaagcaagagggtcggcagcgcgaagttgacggagttcgctgagtcgtggaacctgggcattgagctgagatctgcagtcggcaagcaggtccgtcatgtcgcccattgcttcagcgaggccagagtcaacgatttcggcaacctggctctgtttgccgtggagtgtaaggagacgcgctgcgtcggcgaacttcgatccccggcagagaagtcgtgcggctgtgacgacgtcatgtaaatgatcggcataaattgttgctgccgagatgtagtctttgtgttcgtcaaccagggttgtgatcagggcgtcgatgtgggcagccagatcttcctcggatagagatgccatcatggcacagtacaaggactcgcgccatttgtgtgccagcttaaagcacttgtaagcactctcataaagctcaagtgactcgtacgctgaaattgaaaaaaataacgaaagttagcttcctgtccattttttcttgctttgttacaaccaaatcacttaccaattgctgcatctttgtgtctcgattgatcctgtaggtagtcggcatatagcttggtgatctcccgttggtgctctgtttggtacttgtagagctcaagggcttccttgtacaagatgtgcttggcaacatatgcactaatctcatcatgagcattcagagcatacaagtgccccagagccttttcgaagcgagaaaggtgattgtcgatctcaaattgacgccgagtctctgggagctgttgtagcttccgaaggaatggtaggtactcgcgagggtcctgaaaattcgttagtggtgagtgataacacaggcaaagcatcccaaggccttaccatctgagcttgttgagcaaccaacaatgtaagctcgaggtcatatacacccaacgcgtgagagtaaagccgctgagcatcggtcaagaaacacatgtgcgcaatagcctcttcagcctgttctggttgttgctctataatacggttagtccttacccaattatttaaaaggacaaaaagagccaagtacttacttctcaggcctgcagcaagtcccagtcctgcctccatatcaggcggtgacttgcaaacatgcgctgtgatcagattctgcaaattggtatcgacacggttctggagagccaccaggaatgcatcgcaaatcttgttgattttgctttcctttttgccaaccttaggggccaagggaatggttgcaccgcccggctgggcgacagctgctgatacattcttggatattttcagcgtgtctttatacagtgtctgtgacacatcgtcctccctgtatgagagttagtaaaaggttttcttatcagactcgatattgacgtacgacaagcgtgacaggaaatcatcaatgtaatcaatcttcttgacttgatcaacaaacaaagtgatgttttccatgaactgttccggggcataatcatgaagaatgttgagatccaccatctgactgcgacacgcaaggaatgcagaccgatatttcttctggtcgatgaaggtacggattccagccaatactagagcacgagggaagattgtctcaatatttcctcgaggagcttggagtatgaccgcgaaaatcgacggtatcaccgaaaccaaccgagagccacgttcaatgctcctgcaccgttcatcagtttctggtgtatcctcgggaacctccatttctgcaatcccatgttagcgtaagtagacatagacgcccaagaaacaatcttaccatccacatggttcagatgaacaaacttcagaagatgcgccgatgtggtgaacaaaagatgagatggggtcacgaggaaagatgtgcagttccttgcaaggactcgcttgttagcatacaaggtgccggttctcgtcattgcaaccaaaatgcgctaccggagttagcaacaagatccaaatacttgggaaatatagtcttacctcatgatcagagatagagacaacacgagcccaatgggtgtcaacattagggctctcgccccatggagcgatatctagatttccagatgacgactcttcaatgctcgagtagctgacaggatgagctggctggcgggcatgtgagaaccacagagcttggtgtccaataccggcgaagatcgatgacagttgctcggagtccacagcctggtatacggattctgtggtgcgagtgtccagggccgtcctctcgatacggctcgagtttggtccgttgtctttaagcacatatacctcgttctcattcaagaacgcaatctgccggggccgactagccggggcatctgataacggatagcttgactcgaggatgggaacaggaacaggtcggctcttcagagaccagagataaacggagaaggcgttgctcgtcagcacagcaatgcggtttccggatttgctgaatgcaacatcaatggcgctggactccaaagccagctcgttgtgtgccatgggagggggtaccccagccattcgcaggggagtcaatttgagagtttctaatacttggatcagtactgttcccaatcaggttcaattggcatacttactcccatcgatgactgcaacagcgccaacatcatccggaatggaggtagacccatggttgatatcaaaaacatagtccacatccaagatcgaacctgtttaaatcagcgtccgttctgacattgctctccgtgcaaggatatcataccgttggagccagcaacaaatcgcaatatcttctcttggtgccattcgaaagagtatggaagcgaagaatttgtatcagccgtgataggaatctcttgcttcaaataccaatggtagttgcctgttgtccagaactgtacacggtcttgaaacttgacagcaagcacagtagaatcaacgttccaggcgagatgaatgcgagaagcccatgagctcatttcttccacagacagacgaagagagaactcgccgtggcggagtccgtttctttcgaagaacaccacatcgatccgatcgtcgcgtcgttgaattccagcaatcaagctgccagacggccgccagctcaaagcgccttccaacccgtcaacgggttcgcttacactgtccaaagtgccctctctcgagtacactctgatcacacggcgactacccgcttcaaggctgttcacagcaacataagccccatctcctcgccagctgatcgtagtgctgctatcgtcgcggctgctcaagactccttgatcgatcttttctggtaccgtcgggtctcgaagagccttggctctctttccttggaactgtgtttctttcttgccccatccgactgacacatgctgcgatgattgcagatcactgtgagcgaaagttatatcggccacattctcaaagtctctggtcatatacaaaaacgtctgcgctctggtggtgagagccagcaattcctcatccggtgaccacactgcagcagtgattccgacatcaactgagccgacaatttcgatcttgtcttcgccgggaaggggctcttcacgaacaacgactatatcacctccttctagcaccagacaagttgtcaggttgtccgcaaagtaatgcagagagagcacacggtcacatgccaggtctggcagagggcacggagcatcccaggaagcaatacattcaaatgcttcgggagacagaggatctgtcgaagtgatctcgggccttttccgtctaacctcaatgattgcattgttctcggccggaccaaaggtgcagaccaccgagtctgaagcagtatcccatgctgtggcagtgagaggcagttcgctctcgatttgcgtctcgacgagacggacgcttcttaagttgcgcatcttccaggaacgggtaactttttttatgtttcttgttttaccccgccatgcagcgatcaagggagtaaatgtatggatttcaaacgatatcgagggaaattaaattccgtggaccagcctttcttccctgctgacagtaactgtctcgttgcttgggagtggttgtgttcgtggggattgatatatgaatcgcgcccagagattttttggttttccacagcggctcagccaatgacttcatccatatttcaacgtcctttttaagctacgcatttcaacatctacacaggtacaatggggtcggtgacacgcggaaccaattttcgataataatctctagctttatacatgatatccgcctctgcttcaatccgatccaagttttcgaccacctagtcgcccagactgttatcgcaagaaaaatgcagtgggaagggcaatttatttggtcttgtaggtttgccagactagtaggggggaatgttagagtattattaaggcgtagaatcgtggagagggggtataactcaccagcaatggcaaagggagtaccgaatccggtaactaggtgatactcgagttagtcctggcacagcgcatatctccattaggggtcactaactcatgaaagcccagtagcgccagaagaagtgcttggtgagagggttgaaggggatgttggtgcgaggaccctcggcgtagtggtaggggctgccgagctgggtgcgagtggtggagaagccacgacgggcagcgaaagaggtggccattctggcccggatagcggaggagtacatctggaatgaagaagtcagtgagatcaattgttttatttcaggttagaggtactaaccttgagtgacagagaggagagagtggacgatcggaaagggacggacgaagccgaagtgaacatcgcgaggtgcggaatgggatgatcttgaatcacgtgacttggattgctctaatcgggtttagcgtctttgctcgggatcttccccaccgcttgcccgatacggatagaactgttaaatttctcaaccaaaaaaagtccagaccggttacctacgccgctcattctcctcctgtggttgattcaccaatcccaaccgctggagatggatgagctctttgacgtctttgaggaccagcctcaggcggtgaagccgtctgagggtgcccccaagcgcttgaagaaggataagcacaaaaaacgacaggtgaatggagccgtgaagaaaactgcagatacccagcctgaacagaaggaggatgttgcgatgagcgatgcacccgccgcagaagtcgactcagcagatgccgaagcccccgcgactccgtccgaaccagagcaacccgagacgaagcgacctcgattggatcaggaacccgagccagtcgtcgccgattctttcgaaaccgagcaggagcgtgagattgcagctggaggacttgctacggacaccgatgcagttgtggtgtctcatcaagtgcgccaccaagtcgcaatcccacccaactacccttatgtgcctatctcccagcacaaggctccggcgaacccagcaaagacatggcccttcacacttgatcctttccagcaggtcgcagtttcttcaatccagcgtgaggagagtgtgctggtgtcagctcacactagtgccggaaagactgtggtggcagaatacgccattgcgcaaagtttgaaacaaaaccagcgagtgatctacaccagtccgatcaaggcgctcagtaaccagaagtaccgtgaatttgctgccgagtttggcgacgtcggcctaatgactggtgatgtgaccatcaatcccactgctacatgtcttgttatgaccacagagattcttcgttccatgttgtaccgtggctctgagattatgcgtgaagttcagtgggtggtcttcgatgaaattcactacatgcgagacgtgaatcgtggtgtcgtttgggaagagactatcattctgttgcccgataaggtccgctatgttttcctgtccgccactattccgaacgccatgcaattcgccgaatggatcgtgaagatgcacgaccaaccctgtcacgttgtctacaccaactatcgtccgacccccctccagaattacttcttccccgctggtggagagggtatccatctcgtggtggatgaaaagggagtcttccgcgaggagaacttccagaaggcaatgagcgcaatcgctgacaagaaaggcgatgacccggctgatgctttggccaagcgcaagggcaagggcaaggataagcaaatcaataagggtggaatcaagggcccgtcggatatctacaagatcgtcagaatgatcatgcttaagaactacaaccccgtcattgtcttcagcttcagcaagcgagagtgtgaagcaggtgctttgcagatgagcaaactgactttcaacgacgattccgagaagaatatggtgtccaaggttttcgaaagtgccatcgagatgttgtctccagaggatcgccaattgccacagatccaaaacatccttccgcttttgcaacaaggcatcggtgtccatcactcaggattgctgccaattctaaaggaaaccattgagattcttttccaggagggtctcatcaaggttctgtttgcaactgagactttctccattggtctcaacatgcctgccaagactgtagtttttaccagtgtgcgcaaatttgacggaactagccagcgttgggttaccccgtctgaattcatccagatgtctggtcgtgctggtcgtcgaggtctcgatgaccgaggtattgtgatcatgatggtcggagaggagatggatccagcagtcgcgaaggagattgtgcgcggtgaacaggaccgactcaattccgcattccacttgggctacaacatgattctcaacctgatgcgtgtggagggtatctcacccgaatacatgctcgaacgatgcttcaagcagttccagaacactggaagcgtttcaggcctggagaaggagctcgaaggtcttgaggagaagcgcgcgaacatgattatctcggacgagggaaccatccgcgaatactacgacctacggaaacaactagacgcatttgcggacgatgtccagcatgttattacccacccaaattactctttgacttacatccaccctggacgattgatccatgttaagtacaaagatgccgatttcggttggggcgtggtgatcaaccagaagaagcgcaagcaagcgaacaatgagaccgagaaatttagtcctcaccaatctcatattgttgatgtcttgatgaggatgtcgggagggtcgtccattggcactaagtctttccaagatcttccgcccggtgttcgccccgcaaaggaaggggaaccgactcgcagtgaggttgtgcccattgtgctgagctgcatcacggagatctctcacattcgcatcatgcttccgaaggacatcacgtcgcccggctctcggaatgatgttatgaagtcggttgatgaagttaagaggcgcttcccagacggtgttccgctgcttgatccgattgagaacatgcagattaaggatgaaagcttcaagaagctgctacgggtaagaagagattcttttgctctcagacattattcactctgctaaccatgtggcagaaaatcgaggttcttgagtctcgcctcctgagtaaccctttgcacaactcgccacggttgactgaattgtacgaacaatacgccgagaaggtggacctgactgcaaatatcaaggcgataaagaagcagattacagaagctatgtcgatcttgcagcttgatgagctgaagtgccgcaagcgcgtacttcgtcgtttcggatttatcaacgaagccgatgttgtgcagttgaaggctcgtgttgcttgtgaaattagcacaggcgatgaactgatgctgagcgagctgctgtttaatggtttcttcaacaacctgactcctgagcaagtcgcttccgtcatgagttgtttcgtgtttgaagaaaaggtcaaggaagcccctactttgaccaaggatgagttggcaaagccattgaaggagatccaatcacaggcccgcatcatcgccaaggtgtcgcaggagtctaagatggccgtgaatgaagacgagtacgttcagagcttccactgggagctgatggaggtgatctacgagtggagtcagggcaagtcttttgcagatatctggtaagcatccccttcccccaaaccaatatgttaacagtatactaactatcctagcaaaatgaccgatgtctatgagggtagtttgatccgtgtcttccgccggttggaagagtgtttgcggcagatggcgcaagctgccaaggtgatgggcagcgaagacctggagagcaagttcgaggaggccttgggcaaggtccgccgcgatattgttgctgcccagtccctgtacttgtagatacgatatcccattttacgatcgctggagtccaaagaatatgattacccacaatttttccttttctttcccgctattacgtagaatgtagaatgtagatgatgcgggtattcgtatagccttgcccgaaagcagtggagtatactttaatctgtcacttaatatgtcactctcgatgaaaccaaaagaaaccttggaagatagaagacgatttgatttatttttctatatgaattattacaaacaagaccaaagaactctctaatggtcaaaatctcttttaagggcacagatctccaaaaagctgcgtaaagggagtgcgttgccacctgcaacgcctactttttctccaccgctacctttctctacccttctctccccacctcaaaaccctttttatcctcttcttcaagcttgcttttcattgctgtttctttttcactcttttggatatccgagtcctttggaccatcacatttattctttgccatccggctgtcatcatgaacagcttggtggccacacctcctgttccgcctcacttctacgagaactcccgattctctccctcccgtatgagtaagatatccctttccccttggaatgatttgttctctctgtcctgtttaagatggttgtctttgatgcattcggatactgaccaaaccatcagtgtctacaccctcgtcgtcgtattccagccgtaaacggaaagccgacgacgacaacgaccatgatggacgcatgtctgcttcgcccacaaactctcccgcctttactcctcgacaactccctcacagctaccgcaacatcaaacgttcccgaccgaacgtttcaggccgacctctatctctcccccgtttgctagagaccctcgatacagatgccttgcggacggttgtacggaccatgtgcgagcgtcaccctcaactcgctgacgaggttgtgcatacatccccacggcccaatgtctcctcaactcttcaagtccttcgaaactatcaggccgccctccagtcctcattcccgttgggtggcaataccgaatctgactatgcctacaaccgagtccgacagccgctcaccaaccttcttgacgccttgagtgacttcacccccaactttcttcctccgaatgaatcccaagcatccacatccttgagctacctagacggggcaaccgacatcatccatgccttgcctcgctggagcacgccacagaacaacatcgaacgagattcagcttatgatgagatgtgcaaggcatggattttggtcatccgggaagcggcaaaaagaggcggcggcattcagttgcagtacggaggttgggatcaaaagctggccaagcacaaccagacttctggaggaaagctacagggggctgtcaacgaactcggcttcagcttgggatggatgaatggacccgacacaccatcccacggagccaacagcgagatgggctctatacgggaccagctcttctccggaacttatgggctgggaacaccagtcaaggtcggaccttggtgataaatcacgccactccgattcccttacgacacactaccattacatttacaccgctcttgcgtgtcggcctcacgtccccccatccgtgccggccctcttttgagcttgaccgacggtccatacccctttgaccgcgcaattttcgacgtatgtcacgatcacgatacctgctgcatgaccctagactcaacatggtcagatggcgttatagtactcaaggcggataactacagctttttttttttctttgtctttttcggctggaactctggaagatgaatgctgttatagctttgttttcaaatttttcaatgaactcagactcagtaccttttcctttcttccctactttgctcatttatcgtattccgatttatgcgcataaccttccttttctctttgctttcttgtcagaatctcgaatcctttcatctgtgtatttcattccaactctgatactctctttctatatctcctggcgccctggtgtcgcatacatttccctctttcattccattcatgtctccttgtctttgtcttctgcgttgctgtcagttgtctttgcgcgtttcactttggggacttggactcggtctctcaattgcctgtgccatccaaaccctcacatattccaatgatgcgtatcaaggcgacaacgtctgtccggccatcgaacccaatccttgtgctttccagctttggaaaattcgggggggggggggggggggtttgaacctattctatacgttaggagaggaccacgcgccatccaacctggtctacaacctacgttttgatcttgtcatatcgcgcaacatatttttgatacgttgttagatgatagggccctttattcgcgctagcttattatcattggaatcctgtcaattttcttagagcttttgttcattgggtaaaaagcatgcaacaacgaacgacattcccctattctcttagggctgctcggccatgtattgccagcttcatagatattctgaacaaaactgatagatagttaccgagagcagatcaaaacagaatattgtcacagacaacccatcccaatcaaggaaatcgctcaatgcaattcataattcataccaacgcccgcttcattaaacgaagcaaccacccagcatcttcccacccaccctgcgtcccaggcttctcaataggagcagcagtaccagtggaactctccccatcagacagatccccatccccaaccgacccaagcgagaccgtatcatcagcccgcccatccaccaaaacaggttcctcaaatgtaacagtagtactagtatccgccgtaccaatccgcgaagcaggcacagcagccggagcagccgcaggccactcatcaaccccgaaaagtgtccactcaaccaaccgatcaatccaagatccaagcccgaacccacgctcacgcgtcaactgctgcagatccgcttcatcgaaatcatccggcatctcgtcagagccacccgagtacacagaccaagtctcatcttcatccgagccacccccatcccagtacatagagtcttcatccgggaatcctcgctcgcgatgctgcagcgacgccatctctgcgcggatgcgcgcatccacgaagtcaggcactagtggactacgaccgcgcgcttcgggactcgccgtgcgagtcacggtgcctgtatccgtgcccgagctgataggtacctcgttcgctgctgataacggtacagccgggagggcggtcatggttagatggactctactactgccgggtctgctgccggcgcgggagcgagagctgcgtcgggagagggcacctgctccgcctggtgttgaggcaccggagcgagaaatgcgtgacgagacgcctgatctggtgcggtggtggtggcggttagtgggtgtttcgtcgaaggaggtgtctgggacgagggttgttgaggtctcgcgcttggagagccagctttggcctttttcctcgcgggttgaggaggctagggctatgcctgcgcggagcatccattctgcgtcggatttgggtttcggggtgttgtctgggagggggcgtcgtccttgtgaatgggagatgctgggatgctttttggtgtttgggatgtggtggagcgcttggcctagttcccggttgtgcaggttcgtgtcgcttaaggctcctgtccctgtagagcttttgctgcgcttgtggcggcttcgcgagttgctgcgtgagtgcgagaggatcggtggcgtgcttggtactgagacgctggatagataggatgatgttggaggtgtgcgggtgccgctagctggagctacatggtcgcggtgattgaagtaatctgttatatctgtgtcgtcgtcaatgggaaatcggggggttaagggtgctagagatatgtggcggagggatgggtatgagcgacgggactggaagcctcccgaggtggtgttgaactatatattccacgttaaatctccagttcatgtttttgtctgggtcaaaatctagtacttacctccatcatgagtttccaggtgaaacctcaagcagaatgaaagaggaagaggtccagacggtggaaatgcggagttgctgcacgtgcggttggcatgtgaaagacgccggcaccggcaattatgctgaagatattatgcccgaggatagaaatacgttcaatagatagaggtatactgcgtgaatggtgcagaatgtaaataagcagaaattgaatcagtgatagctggccgatatatggaagttgtccaatattacgacgaagcgcagttgtacagttaaatcatacgactacatatgtatacattgagacacgatgaatgcccgtttggtgcaaccgaactggatgtatgaaaaactagagctgttcatttctatctacaaataaccatcaaaaatatctacgaagtataccaacatatatcggaaccgcctataggcgcgaatcttgcaaattcaaatatccctggcccttgatcttcaagtcttctagaacgttgtattccataatccacttcatccgctccatcagcgcatccgggttgaagttgttggacatctggtcaggagaatctgagctagcgagcttgccagcttcgtaactggtctttgtgacccggtctgtccggggcttacgcaggtcctggtaaaacttgaatgcagcctctaggtcatctgttttccaatgtctgagaatagtggcaagggcaatgccagattcaattgccatgcatgttccttggcctatagtatgcaattaattagtacacgccccgcaataggactagatacagatacaatgaaacgtaccttgatgaggaagagtcgagtgcgccgagtcaccaagcagaataataccacaatctttctgcccgctcttcatctcataccacttatcgatcggatcacgcacgtacagcgcctgtttgagcatcttgccgtcctgggagctcttgcgcagaccagcaatgatatgctgcacctccgggcaccagtcacggacgtgctcctggagagtgtcaatatccgagcgggacatccagctctccgagtcccaagcctcaagtgactcggacataaaagcgaccacggcagcacggtcggttcccgtctcctggttaccaataggcaagatcaggacatggcgcttgggcccacggaagttaacagtcttgcgcagcagctgtgccgtctcagcgggtaggtccttgtagtcgacaaatccgcgatacacaacctggccagcgtagatggggtcgtctcccaggcccatatcccggcgcacattagacttgataccatcacagccgaccacaatatctgcttcggcggtgctgccatcctggaaatgaagtgtgtacggtgcagcaccggccgcgttgcggtcgacggataccagatgcttgtccaagttcaggcttgactcgggtacgcgctccttgagcgagtctagtaggtgggcgcggtgcagcaggcgggcgtgcggctgcgagaactcgccaatatgacctacgtagtcgccggtcttgtagttgtggtactccatatagctgggcagcttgcgtgaggacttgcgcatcatgctctcttgcagaccgaaggcgtccaagacgcggtttgcgttcgaggtgatgtttacaccggcaccgacttcgccgaactgacctgcttgctcgtataattgcactttcttcagaccggtgtgcagtgcggcattgaggaaggacatgcctcctaggccgccgccaatgattgcgactcgcttgtcttcgaagcccatgatagcgaaatatagaggaattcggagacactaagaccagagatattcttgaaggaatgatgatcgatactccaggttctcgggcgagccttatgtatagtcgctcgggcttcccccgtgaagcattacccgatcaaccgtcttggagatgctcttcggagcatggattaaatgtggggtaagcaatgattccgagattctacttcggatttcccgagttccagcagacgttcatgtggaatacatagtacatatgtggattttccaaatttcgagattcgactcggggttatgcatttcactggaatatgctttcaacgtttgattttatacttgcatactctgttttatattacttgcagttcggattcggtaatgcgaggcaactcccgaggaagaacgcagatattgtacctactagtgtatgtcttggtatagccgtatgaatttcagacaactacctacctaggtaggtagcaaatagtgtattatattgtatagtccgaatgatctgcagaacagaataaagtcgtagatgtctcagaatcggaagtccccgctattgtggaggagccacatccgaaaaccccgagctgtcggaccatcttttgattggctcaccagcaacggacgactctcggagaccctcggactctcggtattggtgactccgctatatcaaatcatcatcactgtcattggccgggtaaagcgactcggcatacctctatagactccatatgtatttaaccggtttttctactccacaatttttcccttgttcacgacgaagccctccaatgcggcaatagcggcccacaaacgattttcggcttcagggaagacaagcgagcgaggactgtagaagacctcgtcatccacttcctcggggtggcggggcaggcagtgcataaacttccagccctccttagcgccaccgcgcttagccaaatcagcagtgatctggaagccctcaaaggccttcatgcgcttcttggactcctcctcctggcccatggagacccaggtatccgtgaccaggatgtcggcgttcttgacagcttcctcgggaacgttggtctgagtgagcttgccagccttggagacaccctcaccggcgcgctggatgatgtcgatcatatgcgcagggatttcgtagcccttaggagtagcaacagccatgtccacacccatcttagtagcaccaatggcgagatcgaacagaacgttgttcgcatcaccaatccaagcgatctttagaccctccagacccaggctggagagcttgtgcgcctgcgatgggaaagactcgtagatagtcaaaaagtcggcgatgatctggagtgggtggaaggagtcgcacagcgcattgattacaggaacggtggagtgctgtgccagacccgccacgtcctcgtgcttagcgacacgcgcgacaacgcaagagaccatggaggaaatcacaacggaggtatcgtatagggactcgttgacaccaagctggatgtcatcctttccgaggaacatggggtggccacccatctggacggcggcggcttcggtggatacacgggtacgagtactgcgcttgttgaacatcatggccacggtcttgccagagagggatcccaataggctctccgggacagcgccggacttgatggcacgcttgtgtgacgcagcattgcggactagggtagcgaattcggtaggggtcaggtctgcaatggagagaaggtgacgaggggcgaaaggggaggtgggaggtaaagtcggtgtctggtgggcaaatcgtcggattccattagcctggagtgttcgacgcaaagatgaggtagagccggccaattggtttacactttgggcaccgtagcgggcggcagctgtgagaccactagccatgatgagctggggggattcttgatgaggaattggagtgttgtgggaaagagcaaaggaaaaggaaaagggaaaggggaaggggagccctaaaagtaaagaaccttggaagagtgactcaataaattaaggtggatgcccccgggtgtgcgagggtattgatgccttgtcgcctaatattccaggtgcgaaggtgtgttctccacagttccaaggttccgttatcaggcttatcgtcatcgagggtccagccagcctcttccaaggttaggtacgtctcgcctctgtccgtctttctctgtgttacgtgcgtcgcttccatcccttttcttccaactggtatatcagctccagataccacaactcattgtgattcatctacatctttagggccacgatggctgacgaggcaaaccggcctctgctagctgggcagtcgggctccgagagtgtatccgatgaccggcccaggccatcgtatcaattatccacagagttatcaaatgttttatactactctgaaagtaactcgacggtccatacaaccgaacaacgaatatcacagtctcattcaggcggggctacgatgggggatgcagcgaaccgggctctgttggacgagcaatccagccctattgaacggtccccggagagaacatcctccgaccagcctaggccatcatatgaattatcgtcggaatcaacacctctcttacaccgccgtgatgatgaactggcctacgggactgagcaaggattgttacgatccccttcagtcgcatcacagaatccgcccgaggatggcgccatcgacaagcggagccgtgtaccatggccgacggtcatttctctctctattttaactctcggtgttttgacgatactggtacttgcctttgctgccccggcggccgtcaaagagtatgcgcagcacgccgctgtcttcaagccgacggcagtatcaatcgattctaccacacccgatggcgttcgagcccggattcagggcgacttcgtaatggactctggtcgcgttaagaataagtcggttcgaggcattggtcgattggcgacatggattgccagggaagttgagacaggcccatcaaaagttgaagtatatctcccagaatatgggaacgtactcgttggaaacgcagcattgccttccatcaaagtgaacatccgtaacggccatcataccaatgtcgacttcctcactgatctagaggctggtgacattagagggatccacgcggtagctattgattggattgagggaagattgggtcgccttaatgtcaagggcaaggcgacattgaatctcaagtcaggcttgtttgctttaggaactcaagtcctgacagacaacatcatcattggaggtatagtgtatttgttcgtttttggtactggaacatataagctaatctctttccagaacatgatttccctgctctaccaatgatcaatatcctcaagctgaatatgcacgatgcaaacagtggtgggatggcagtggatgtcttactgtcgtctttgattgattctcccgtcgctctcactgttcctgccctcgggtttgacgttctggtgcccaactgctcccctggagatccttatattctggtcgccgatgcaaagacaagcgcgatagacgttcaccctggccaggaaactgcggtgggtgttgagggtctcattcaacagctacctgatgaattgatctctacctgcccaggacaagagggttctcctctggatcttttggtttcgagctatatgcaaggtcttgaaacgaccatctacgtccgtgggtccgatgcaccatcactcaataccccagcatggattgtcgatctactgcgcagcgtgactgtgcctcttccatttacggggcatgcgttggacaacctcgtgaagaacttcacgatgtccgatacacatttttcccttcctaaccctttcgcggagccagattctccagactcccgacccacggtgtctgcttttgttaaggttcttattgctctaccggaggagatgaatttccaagtagaagtcccgcaagttcgtgcccttgcagatgtctactacaaggaagagaagtttggtgttttaaacatcagccactggcaagacgccaactccacattggtggatgaccaagatggctcctctgcactccttgtggagttcgcaatcaaagatgcgccgttagaagtcacagatgatgggcttttgacagaagtcatccaagcaatgcttttcggtagcgaaacagtcgtactgcgggttgctgccaccgtagacacaaaggtctcgactgggttgggccgtttcgccttgcgagggattcctgcagaagggaatgtgcctgtgaagagtatgttttcatgaattagaagatcttagtacaaatcaagaatatttcgggcattgaccatgtcatagcttccgtcggcaactcgcttgaccaagtcaatccgcgcgtcatctcactgcaactaggaaacacgactgaatcttcgatgttggtgtccacgctggtcaacttcactaatccaacgaattactcggttacagttcccttcgttgaccttctcatactctacaatgacactgctgtggcccacgtcaccgctcagaatatctctgttgggcccggcaacaacagttacgtgcccatcgacttcttctggtgcccgtcggacgcagctggagtagatggcattgaggcaggacgggcgttgctttcgtcttacgtatcaagtcagttccttctgggtggcattgagccccaactggtagactgtgctgaagcttttactcaggttttaatacaacaatcaccatcaaaagccatcgaaacacgattccatctctaccagacctgggcgaagcattatcaattctcaacattactgttcctgtccctcgcatatctgttcctggcagcgatgacaaggacacaaagccccatttcatccaagatgcaacggtacgtccctttcactcataccgcatctctacaggtagagaagagaaagctttctactaacactaactcacaaatctagttctacctctggacctccacagcagacttcaccctctcttcacccctaacagaaaacaatatcctaatcacttcaattgacgcaacggctttctatgagaaaaaggagccaatcggccgaatcgatgaccatgaaccctttgaagtgccgcctggcatatccaagagcccacgcttgccagtcaatcttgatatgggcggagttggctacgatgctctgcgcaaggcactcggccagtcattggagatggatgctgtggctaaggttggcgtgatgattggaaactacatggatatcattatctaccatgggaagggcattgcggctaaagtgaggatttagagtgtagttgccacctcctgtataatggaggtcgatgtcttgcttgctgctggatcggcaatgcttaggtgcccatgatatatgggtgactggtagtattcggaatttacaaggttgaatcaattcccggctatcagaatatatactctcggtttacatccaaagatgaaacaacaagaaaatcagatcgaagtacgagtaagagtaaaggaagagatacatatatgcccaggacggacttgtatggctccagaagtaatggactaacgcctattttctagtccttctgtccaggtagggcttggctgagggggttatacctcataggtccgtcctatctagataggataaaagataaaaaggatatatatatataaaaaggtcaaaaatccgaaacccccaaatctggctggacagtcatgctctacctacctagcttgctccctcgttccagcgccgtgtcatccttcttgctctagggctgagtctccttcaatgttgatcccaagccgttcccttgcttctcattgggatgccgtcttctctctcattcttctttttttctttcccttcaagtatataatgacatgctggaaatgttgcttttgtatgagtaatacctgatcggctattccaaggtcgggagtacctaggtaaatggtggagtatgtacaatctccgatctaggaaacgccccagcagacgcggaatatcagaataaccgtacaccgccactttgtatcatcactgaatcatacagcaaggtgtatggggacagtaaggaattgtatgtaaaagtgagggaaacaacatttgtgtcattttacatacaatggctaagccatttatttattttatattaggtcaactccacgggaaagccagaagatacacaaagccaagagaccaaaccaatcctattcgggtatgtaagttgtgggttggtaattcggatatagcttagccagggggcagggtgctggcatcaacaacgtcggcagcatccttctcgatgtcctcgttgggctcactcagaggagaacggggaagggccatcagaccagtccgggtggactcaaggataccgaagggaccgatcagcttgaggaaagagtcgatacgggaaggcttggcagagctataggaggtcgaatgagtcaattgtgatcaaaaagaatgaggcagaatagagaaaatacttacacctcgacaatgcagttgttggtgctgatatccaggatcttaccaccgaattgatgagtcaggcgggtaatggcatccaagtgctcgtgcttgtgacgcagagcctgactctggggaagatgacgggggtggtattgctgggcggtgtggtcaaggctgtggtgcttgtggtccagggagtctggcgaggtggtgatctcgcggtggtgctggagaagctcctcgaagaactcaggaccaaggatagagaccttggccaggagaagctcacgctgcacaagagcggagtcagtgtagtccagcacggcccagacagggacaaggtcgtcaagctggcggcgagcctgctcgacaacgccatcctggccctgcaacacgatggtcatacgagagagatcctcaacctcggtgttgcacaccaccagactgtcgatgttgaaaccacgggcggccaagatacctgacacacgggacagaacaccgggctcattctgcacgaggcaattcaggatgtgccgcttgggtgggttggagggaacaacgggagtctcatagagaatggaggagacagcggtcggagcatcccattgaggagaagcatcggagaccggcaggggcagaggggatcgacggtgcaacgccttgtaggcaagagctgaagttgagctcgacgatgcacgaatagaggtgaatcgaggaatggcagcagcgcgagaccgggcagtagctgtagcagatgacagcagcgacgctgaccccagggacagcgtcaatgggcgccggaaagccatgaggagttcaagaagtgtgaatgagttgtgcgatgattcactccagattcgccccgggtatattctttttaatcggccgacctcggcgaccgctcgctgactcatagggagctagatccaaagcggtgtagtgcatccgccagtgataagatcacgtggtaaatatcacgtgatcctcaatattcaacatggcaaaagggattgccagaaaacccgaccagctcttggaaatgagaaatatatagtatttctagctattatcatcaatttgagcttctcaatttactcaaaatcctctcggttttatcttttgtggctttgcttgttgcttgcttggtctccgcctctaaaactccttcccgcaatcgatctggacctttttgagcttcttttccccgacctttcctctcccttttcattctaccccacctttcaccatggcggacgatgaacaccgagttaagcggtctcgctttgaccaaactgagcctgagccccggcgatcccgttttgaccgacgctctcgatctccatccaacagacagtcggagtcggcccgcactcgtagtccgctgagtcgcccgttgagtcgcagtcctggcgcagatactccagcaaagccatccgcagcggatccggccgccgccgcaggtgcgttgtacttgggtttacactgtcatgaatcagattatgtggctaaccattgtggtctctgtagcggcagcagcagccaagattaatgcgcagcttcaggcgaagaagggcattcaacatgttgatgtccctccaattcgttctgtgaatatacacccacttcgattggttctacccaacttctaacatcgtccggacaggccgacaacgcgacagaggattccaagtcgccctccgccgagggtgcagcgaagttgaatgccgaaatctatgtcgcggatggggactacattaaggacattgagatcaatgatctgcgcaatcgttacaccctgacaaagggatctactcagaagatggtaaatatctcctttgtcacttgctgatactccagccatgttcctcagaaaattggggtaccatgaatcttggtttctcaccgttctgctctttcctttcggactggatgaagcttacccttcatagcatccaattcaccctctgttgcatctgctgacctccgctgcgtgacttatagattcaagatgaaaccggcgccggtacgacttccttttatatcttcaactttaggcaaagaaggtctcactcacttatttctctctcaagatgtgacaacccgaggcaattattaccccgacaagaacatggcgactgctgcagtaaggaatgccctccaaagattggcggtatcaattgctgactattctgattcagagcccccccctttacctacatgtgaccagcaccaataaggatggtctggagaaagcagttgctatgattgatgacctgatgcaaaaagaacttccgaacttggttgacgagcgacgattccgtcgccgggaacccgagcagcaggttgagagggatgagtatggccgtgtatgagactgttcctttgctctttattagtatagtaatttggctaatttcataaagcgcaaatggccggatgagcgtatcccgatcgatcttgagccaatccccggtttcaacttgcgagcccaggtcgtcggacagggtggtgcttatgtgaagcacatccagcaggccacccgttgccgtgttcagatcaagggccgtggctctggcttcatcgaatcgagcactggccgtgagagtgatgaagcgatgttcctccatgtggcgtgagtggtcaacaattttcttactgacttcctttctcacttgtttttttttttgcctcgcttgtttctactatgagcttttactaacggcctttcaagtggtcctgacgccaacgatgtccagcaagcaaagggactttgcgaggaccttctaaccaatgtcaaggaacaatatcagcgtttcaaggagaacccaccccagcacaactacggtggataccgcggcggtgatcgtggtgatcgtggtgatcgctaccaaggtggaggtggtggcgctggatatggcggtggctacaacaatcgcccgcagcataatgcttcctctgccagccctgcaggccaggctgctgctgtttcctccccaagtgcttctgccacccccactgcggccgactacagtgcccagtacgcccagtactatggcactgccgacccatatgctgcctacggtggataccagaactacgtcgcatactaccagtactatcagcaaatggccgccgctcagcagcagcagcaggcagatggcactgctccctctcctgctccggccaccgaggcccttcctccaccccctagctcgggatccccgccacctccgccacctggtgcgggtggcagctacagcgcggtacgttattcacgtgtcattggtagtttcgattactgatgaattacaggtccctccaccccctgggctttaagccagaacctgttttggtgggttaatgctgtgccttccactgtccacttgcagtccatttgatttacacggcgaacaaaagcatgtcctggtcgtttgcaaaaacgagggtgacacagcgattacttttcgttaatctctttcagatctctttgtgctaaagaaagtctagcagtttgccttgtgtctaaccctttgatctacctatttccatactcggtaaacttgataattgtgttcataataaaaggcttgcttattgacagtgaaactcttgccatgactaaattctttaggcaagcactggttgctaagcggcccggatgctggattccatcggtttcttgtggtgtatgtgaagtaccaaaaaaaaaaggaaagaaaagaaaagacccccttcctacgccatccatgctgttcgcgcctcggaaatgcaagcaggaaattcgacagaagtaacaagatgacaagaaaagcaaagaaaacactaaatcatgcagcataatctaaatagatgacaatatctctcaatcgaaatccgcatataggagagccatctgagtctcagatgccattttctcccggcgttttgccaacccggcacgaccctctttgcaaaaatcgcaggcaaagtcgcaaggggacgagctcgtaactgatacggcctccctggccggcagttgggaccccatttcttccagctcgaagtcaccgaagaactctttgatcagttcatgtctacacctcctgatactctcacagtatcgaatgaccttgccgaagctttcaagcttggcctctcgattttcggggccattcgcacggtgagattctgtatcccggtagatcatggtctctatgaagttcctttcttggattccgtagtagacaagtgaggcagcggcgcggccatctcgacctgcacggcccgactcttgaacgaaactttcgaagcttcgcggtggcgtccaatgcacgacaaagcggacatcggggttatcaattcccatcccgaaggcattggttgccacaataatggagaaaacgggtgtcctttccccatcagctggctggactggccgagacgacttccatgttgattgaatgtgcgcacgcttggtggcttccacgccggcgtggtatgccacggccatgaccatttcgtccgaggatagccgactggcaagatgctcagccatagcccgggtccctacatagacgattcctgacattggagggagcagtgtcactctgctgccaagtcgggcctctcgtcgggttcggatgcccttaagccatctgagcaggttttgtagttgactgtcttctgcactgtcgctgtcgccagcgaaatctgcgagataccgtacctcgtagtgaatatttggacggtccgatggagtgttgaacaggcggagattctcaagatccaaccccaagatgttgatcatgtccgagcgaactcgcggggtcgctgtcgctgtcaaggccgtgattgggacagtcggatcgacgagattccttctgaaccagcccagctctttgtaagctgggcggaagtcatgaccccattcacttatacaatgtgcctcatcgatggcaacgcggatgagctgaccttgtttgtgaactatgagcagacggcggcggaagttgtctgtctggcacaattccggtgtgacgtatagaaggcgtgtgctcgggtggccgcaaagcatgtcttcaaaaactcgctgtctctcatcatgagtagtattggagttgatcgtagcgactgccacaccaagagctttcaatgtatttacttggtcggtctgttagggattagctatttgattgcaaacgtcctggaaccaccctcaccatcaatgagagaagtggacaaacgacgacagtcactggagatattgaagtcagactaatatgtcagaagatacgagatgctgaaaacccacagccccaatctttcagtaccgcggggagttgataacacaagctttttccgaacgaagtgcatgcttggagaaagacatcgtgtccttcaataacggatgagatcacttctcgttgaagtggactagttatgtggtagtaagtaaattgaccgtcttctgtagttcgtcaactcaccggaaatcattctttttgaaggtgtgtttcaagacccatcgcatattggcggtttggcgcgtcaccgccgggttacgatccattgtgcctcatggcagagatagatgatgatttaaggtggtaggtgaaagtgtagtcgaagaagattgagtcttcaatcgcgtcccagaacgcgctgtcacgtggtgacctcttactcccttttcgggattgattaaatttgacttgggttcacttttgaaagacttaataacgatataaagaactagagtctacaaactgggcctggtatttatgtaaaataatacatttgcacaaagacacgctagaaatcgaggcggtatatggcagatctatatagaaaataatgtacaagtgctgaatccaaatttcagctgctcctctttcttgttcagcggttccgatggggatccctggacatctgtttatcaagctcttccttcacggcaaagacatcaaccgctttgcgctgttgtggatgccaaagccgctcaagttgcaaccaaacctcgaggacctctttgggaccacaacatgttccaaacgcttgcaggataatggtgatcatccgacgtccaacaaaaagaccattttcgagacgctgatcaggatcccagttttcttcttgctctgcttcgctgggaacctgcaaacgagggttgaagacctcatctacatcaagttcctctatttctgtggattcatcttcattctcatccagttcaggctttgcgtcttgttcggtgtctgggaaatcatccatggcggagccctcggcagtttcctcggatccctgtgcgctcccagctgtatctgctgtcggcagagccaagtacaacccgttgggggcatcggtcactggtagctcctcgacctcgatcgccacgctcttagccagggggttctcccaagtcatctttcggttgttcaaatttaatccacggagtctcgcatttgagtcgcgcagagcccggatgtatgcatgccatgtcagccgaaggttttccgcactccactgctttttcctccgaccatgcagagcgaacccttcaaagaggaacagatagattatagaacgtggtgggacggcaaaagttttctccatgtcacgcataacagccatgaagctgtcgagctggccagtgttgtaggcgtagtgtcgtaggaagatataaaatgttcgtgtgtcgggcgcaatagagagggaatcctggagagcacggtggtattccggaaacttctccttgagtgctgacgacttcttcaatacacggcccagctttcgggatctttcccggtattggggcatgtcatagctcagatttgaaccgccgatgtgaaagggggatccatcgtccgaatgcgagatgcatttgtttttgcttgattctttctccagcatgcgtgcatacagctgctccgcagtttgagtgtcgcctgcccgaaggaaagaggcaatgaggcagttcatgacaacggtgtcgacgatttcgcccgatttcacaaagtcgtcgaaagtctctcgaataccttcaacatcccgtatcatcccaaaatagtagattttggatgtctttccgcaccgtgaaaagctcagaccgcgcttcgtcatttcctcctccagacgatcagcaactttgaatgcactggctttgattgcgatgtcgaacaggatgttgaaaaccacttcgtcagccttcactccagcgatgtgttccatcttctgccacatgcccacggctcggataagatctcgtttcaaaactctgccgttggctcggccagaaagatgtatcgcggaagaccagagtgagcgggataaaggaagtcgagcagttaccatgtcgtccaccaatgccaagtagcgacgagcatctacccaccgtcgatcccgcggatgcgcgaacaaacgcaacagagcacctcgcgtgcgttgcgaaagcaaagctaccccgggggcaggaagatctctgtataatcggaacaggtattgggtggatggatttggctcttcccacaacgttctgacaagcttctcaaccgagtggatttccatttgatcgtgcgactcatctttgtacgtctttttgtaacgcgaagatggcgccaccgcattcactgcttcctcccagtcataatctgccaaggacctttcgtacagcttcgagatagagagatgtttctctttctccggatggatccatgacgggaaggattggcgggggtatttgtccggcaatttggggtcgatgtcggttttggtgtattctgttatctctagtctgcggtcgaaatcgtatgtaaaatcaaatctttcacaacggggttgcgattccgcgtccgcattctttgccggccacaatggtatatagtcgttgtctatctccgtctcatccggcgactcggtctcaatattatactcctctgcattatcgtcattcgtacgtgccaatccgttgctgatcaatcttcttggttgcgacagatgaaaccttgagtttgaatactctggctgtcgtcggggtggtagctgtctgcgaccattggcgcctttggtttggaatttttgtaaattatggtccgaggaattccaggctactgtcgacaacccccgacggttcggcgagtgttcatggcagaagcttgccagaaccagagagccgacaaaaatatctgctattgacgcgacggacgggcgaggacgacgggtacagagtcttcggacagaggaggtgtgaggagggggtttcgagggagacattgaggtctgtcgaaagagaggaagctcatccaaggcctgcttggggtgaattcgcaggcttggcgagctgggggacctatttgaatgaggcatgagatgacagacatcgtggcattaggtagaccgcatccaagagaaagccctttgcaactcgcacaagagagagccgtctactttccgggcgcaaaaagcagacaaaaggggagagggtcaagattcggaagatgcaggtgtttttctgaagatgaacgacctgcactttctgggcggagtccctccctcgaccaatcggagccacgctttgccaatcccatctttttcgctcccgcatcaaccacctcgtcccctgccagcgcatatcttgtctttctttatttgctgtctccagtcgcgtctcaattcttctttcgtttcaagttcgtccagctactggctgcgtccgactatcatgggcaaaataaacctcacagccctccgggtgcgacagacagcactcaaccaattcgccagtggaaagaccagcaaactgccacaatgggtcggtgtggtcggcgagatccctcctgctgaaaccctcattcgtacccgcccccctcagcatgagcttgtccagcagcggttgaagaccgttcctgggtcatcgaagccgcaggtcgtcttccaagtccaagagaagcgcagaaagcccaagaagcctagtcgacttttccagcctgtcgagctcaaatatgaagaagatcaattgcgaactcaattcttccgcgatcacccctgggaacttgcccggccccgtgtgcttcttgagagtactggcaaggactttgaacactacgattggagccgcatccaacagccagggaagcggttagatggtgaaaggtgtgttcccaatatttcgtgttctaatgctttgttttattccatttgatttttcatgtaaatcttccccgatgctaatgtcttactttctgttactagtgttgtccagcggcagctgtggcttttgaataacgtcccggatatgaccaagagcgccgcatacgatattgctcgtcgagaattctacagacttcggttgaaggaggacattcaacgtcgggtggctgcggaagaagccgcggcatatggcgcagagttcggaccatcatacttggacattggtatgaagatggagaacgagcagtacgacaagtgggttgcctgggcccgggaaacatctctggtccaggaccagcggaaatcagctcttagcggtgcaccagacctgggagacactactgagtcaagtggggtcgaggccgaagaaggagaggcggtcactctgtaagagtctgaaatcttcgagtgggctcgaatgccattatgctatgcttccttttccagaagcttttgaacccctagactttcctattgatggcctatgtatattatttgatctgttctgctggatgttgtacttccctagctctatttacgcgatagcacatgcattcttggtcaattcccttatcattctagtttatgcatcgtagatcctaagctatcactaaatatgatccttgatatctcaatttcaatatagtgacgcaggcggagtcgggacgcagagttgcggagatccggtgtttgggcgtgtttcacccaatcagaagatttccagcctcgccaacttgaatgtccccaattcccttcattccaggaccagaacttgatttcgttttggttactcgcgtcagccttaagacgcttgttgattcgatcacattcttcggcctgccagatctccgtcgtggccaatctctttatcgcgcccgcgattgtcaacatccgtgagagcttcattgcactatttcccccggtcttagacaaatctgctctgaactcaaccatttgatacccgactgcttcgtcacttagcgattccgattcttcttcctccaatccgactccacggccgcctcgagctccgttccctgtcaaacctccagatagcccgcccctccgacttgatcacaaccaacgatgctttgcgcaggtgcctgaagtgtgcttatatggtactggtggctgaacctggacattcttttggcttttaccaatatcaattcatcaacgagagtgctgcattggggtgtctgatcaacaacattcgggcttttatccgccatgacatccgccatggctcgttccgaggacacaatacgtggaccgcgcttgcaccgcggcgagatagatgaagacgaaacggacaatggaacgccggagccgagtagcttcctggcgtcacaaaacgatgactctccgtacccggatgaggaaagtcggccaagcactgctttaggagatgcgtcagagagtactagcaagcaaccaactgggccgaaaacacttagccctgaggaaaccattgagctagcgcgacatgccgttgaaagtggtattcaggataccaagcgttcattagcaggcagtgaggccgttacggacgtggtcaagcctaagctgaccattgaccttggccattcacaaattgccaggatccctgaaccagtcgttgacttgatcaaggatgaggtcgaacggtacgtcggagccttggattgaactgttatagtcaaatcttgcgttgccagttcctaggctatagcatcattgctctgaactatactgattactataaaggctgtctctgtcgaacaatcagcttttccatatcccctatcggtttgcagagtgttcgcatctacgctatctcaacatcagagcaaataacttccgtgaattcccaaaaggagtaggtacaatgataaagttgctttgtgcttgcattgcgctaatcctgcttgctaggtttacaaactgccattactcgaaattcttgatttgagccgaaataagatcaaggagttaccaaatgagatcagtaaattgaaatcattgcgagttctgtcagtgatgcaaaatcgcctcgtcgacctcccagctggcctgtccgagatgcataagcttcagatcttcaagtgtgttggtaatcctctgcggaagccactgcgtgacattctggaggaaaccgagaacgagacgacaccatctgggatgaccgacaacgagaaagaagttgcagccacgaccaaactcaaaagatttcttatgaaaacgcgaccacagacgagtacacctgagccagaaataattacagatgcaaggtttgtctgcctcatggtcttgaggcggatataagctaacagtctgtgtcaacacagcgatggtactttcgaggttaaaccggtcccaacaccgataccttcaaagcggaatttgagtggtcggtttccagtaattcccagcactggcgatagctcagcagcctcatctcggtccccgtcgatatcacgggcaccgccaatcccattaaaatcccattatcgcatggcctctggacagcaaggcgctacttaccacatgccaggtctccaaagaccaggcgtagcgcctcattctgtgaacgagcgcaaccgaagcaatagcgagggcataattcaaggatcatctgttgctcgtagcaaaaggatgggactaatcactcgcaaaaataccgatttgggtacattggatgaaacgcgcccatatcgaaacagccatctacggggcctcagccatggatctgtgcttcgagcgcgtcagcctgcagcgccaatagccccgaatgacagtactaccccaagtcccaccagcccaagagagcgtcggcgtccgcgagacggttgggttaatcggatgtctagtctgcctgaacacaagggcgagcgtggatctgatgaaccgataatcaagagtgcaaaaggtattctgtttgccctcgtacaagtccattcccatatcgatacgttgatcaacattatcaagcatgatgacgccaggcgccacagcctcgagcttgtcttttacaatgcttccccatacgttgaccggcttaacgatgctcttgagaaagcatcaattactttgtccaatgacccagggtcaatcgcgtcagtcaccgaaactatcaaacgtgaatgcgagacgtgcatcgcctcctacattcacgtcggcacgcagctacgcaacaacgttgccaagattgtttccaacggcgatccgcgctatgtacggtcgctgatgctgacgatcttcggcagcctggtggagctacggaatgcctgcgctattctcgaagttccgctccagactcccaacaaaggtagctctgctacaaagcccttggttggcccgagcaacccacttccctcggtcccagaccgatcccaactctcgctggtcactccgacaagggaccaggcgccgcccacacgacggttgcgaagcgacacaacaattcgacaccctcaataccctatgactatgacttccaatcagactagcattagctctcctggtttctccacgtacgcacgcagtcgctcgagtagcagatcaaacgtgatgaacacatctatgccacactcgttggcaacccctcgctcaggcgaaaccttccctcctatgcctactcctggtgctccccgggccaacacactgactggactggacgaaaacgaagaggagcgaatattcgaaaagatcttccatcagctgactgctacataccatgccgcatacggggcacttccattggcccgtcggcaattcataaggtgtctagaagctgctcaacagtcacgcgattcagagggaatccaaatcctttggaacaacctcattcgtcgatgtcagttttgcctggaagtctcagatgccctgggacagcgtctctcgaccatgaaaatcaaagaaccaggcggcggactccgcaaccaacgcgagttctggcaactatgcaaatcattcatgcagtcgttcgtcgacctagtgaacgagatgcgcgagctgagaagtatgcagcttctacctgccgacgtcatcatcctccttcgcccagtccaaaaggcaagccgcgaagcaggccgtttgatcgaggtatccccttgggcctaccttgcagacccggaccgccatcctccgcctggtggcttgtacggccctccactacagacctcgcacctgcaacaccatcaaacatccgtttcaacgtccgccctcgccaacaacccctctttccaactcaatatgatgtcacccccgcagtcggtcaccgtccctgcgactccgctgagtgcggcgcttggccctgctgcgcaggccactgtcccgtccacgccagccagtgcatacagtgacaaattcttcgagggtgatgtcttccagcgtgctgactcgcttctctcgtcgaaccaggcgccgttcttccgtcgctgagcgactatgaaatatttttacgctctgtcatgattaccctatgctcatctttatctgcatcttatgattatgactatgagcatatatcgtgcatgccaacagtgttacctcggtgaatccttgtaacagaatctctgttttggcaacctggtcctcaatctgtattcggttttatccatgatttagcgggtggatctcttttaagaactgaaatccgagccatctatcgtgcatgtcattgactccagagacctttttttttttaccatcgaacacacatgcatataatgagtgccctttttgcttctttttccatgcattagcgggttagtctcctgggggagaaccgggccgttacataggtctcaaatgaaataacattgatccctgtttatatagagaagccctctgtacaggctatgccttcgtatacacctaaagagaacatctaaaagcacgtagtaagttctatcattccatcatgataaactcgagctttcgactctttggaacgtattcatatatctattacgtgtggtagagctaaacaatgaaaatatgtaagaatattatgaacgaaataaggtgtctagaacagcacggccagatcacccatgatctgtgaattgcgcttcacacaacgatttcgaatttaaggaggatgctgaagattgaagtctctctagagagccttgaacttccccaggactaagtgaaaagaacaaacaaggtcagccccaagtactaccatactagccataaaggcaattgttcaaaggcacagagtatacatacttgcagcatgagccaggtccgcctgggaatgtgccagaacatggagactgatatcctggagctcatagaagagatgatccttgttcgacgtgtagtaagacttgtcatgaatgcttgcaccctcgggcaccctacacgcaatcccagcagtcagtaccatattactctccatcaatcgcgagacacctcccgagagagaggggaaggtgatacgaggtgcctatacgtaccacgtgataaagactagcttgctccgctggccatcgccggcgggagagtcgtaggtgaagtctacgacagcataccgggcagtgtcgtccttgaaatgggagaggaagtcggggtagtccttgtatttgccggactcggcgacagtgatcttcttgtcgtgtgcggaggcttcatagatgacgtagttaaggttgtcggtgcctttgacctcgtcgaagacctcctcgcattcgggggcgatggttgcgaattttgtcatggtgggagatgtgtgggaaatgctaaggggaagaggggaaagtaaagagaaagacaagtcagggatgcccaagtgggctgatactttgtcatacaatggaagagatcaggtggtttaccccatattatgcggggaagtagatcatgacatactagtacctacgtggatgtgtgcatatgtactaataccaccaagatgcccacttatccgagtagtcctcgaatccatgctcgccaagtgacttctgaacttcccatcaccaatgctgttctttcacctgaatagcatgggtataaacacgagaagcattaccatggaaacaccttgatgaaccagaattccaaatacaataccattttgaacaaaaggggtcagtccttacagggctggatgtattatttctatatcaattccagaatgtccaggaactgaatgaccaaattaacatagaatgtcttggcacgaaactactgacgtgatggactgagacagcacgtgaatatctctaaaccttgcaaaagccaatctccccgcactcgataaatttccatttcacatcaactcattgagtcaatatggtacctcggccggacctcagagcgtcggaccaggtcgtcctcagagcacccagggatcgagcccttcgatttagacaagatgggacatttcacattacagtctttgaggatctacatttcgccgagggtatgtctcgataacccctaggggggggctcttgctaagcgcttgcagacgatgaaaaagacaggaagtccaaagaagtgatgtcatacatcctctcggaggaggacatcgacttcgtagtcataaacggcgacctagtgtccggtgaaagaacccaaaaggccgattcaagcaaatatatcgactcagtcgtttccccgctcgtcgaccggggttacagctgggcatcgacctacggcaatcatgatagtgaggttaatctcaacccgaaagatgacatgttcgaggccgagcgcaagtatcccaacagcttgacgcagagtagggtctccggcgacaaggccggaataacaaattattatctgccggtatttccacacggacaggcgaataccagcacgccggcgctgctactgtggttcttcgattcgaagggtggacattactataaaaagcaaggagagggcggacctgctgttaggagacctagttggatcgatgaatcagtagggaaacctcctggtcatgtcacatttttggaagaaatcactaactggctagaaggtcgttgactggttcacccaaaccaactccaaactgaaagaggagtatggaaaagtcatcccctcgctagcattctaccacatccccgctcacgcaatgctcgaacaccaacaaagaaggggcgtaaatccgcacctaactcccggagtgaatcgcgagcgcgtgaacccgcaagggaccggcgactggggctacgatggccaggacgtcaagttcatggatgcgctccttcacaccgaaggcctaatcgcaggattcagcggccacgatcatcagaatgattggtatgcacgtctaggcaataatcgtcacttaaatgactggaatgctaatcgaacattgcaggtgctttaaatgggatggctctcttgttgaccacgatctaaccggaaatggtatcaatatgtgctacggtcggcatacggggtatggcggctatggcgatctgctccgcggtggacggcagattttactccacgagggcaatctcggagatgacacggagacgtggattcgattggaggatgggtctgcccaagctcgtgtcacgttaaacacaacttatggccaggatccttaccttgctgttgctaatggtgctgggaagcccgattcctcgacgcagggctctttccttcctttgtcttggttgtgggttccgattatgatgctctcgcggtgcaggatgtagtgggctcttttggttatagacctcggagtgttatgttattcttgattagacttagggctatatagagatattctgcatgagatagattaggtattcaaggttcttccctcttcagcactttaagactctattctcgaggtctatctaaataatggattatatacaattctatgctgtgaatactgttatgactcctgccactccgtctttcttgtcatcttccaaccgtccatctatatccgggatataagtattgacagccaataacttaccatcacagtttacaggtagatgtagcagaaaggaccagagatggtactcatgatatctcgcatagcaacagtctcgccaccagcataaccaatatcaacaagcgtgtcaagggtagtgttaggcgaaggagggccgttcaagaaagtcccagtgcccgaaatagcattcatacgctttctggggttcaagttctgccagatccaccaagtgcgatcaatcataccatggtggagccagaaagcagggtcaccagggctaacaaagacatcacgagaaggatcaccgcccatggagtagtgaccaccaccgtggacgccgatgttgccgctgccagggacaccctgcatgttcatctggaagtcgtagatgttgtcgtggcgcaggatcaggtccacgatcgcagtgaaattagcgtagtcatggacaatcttggagctcagatcgcgcttcagacagcgggggttgtatgcgagcgggttggctgtgctttccgtttcacctcctggcagcatcagcgcgaccgggcccaggttgacagagtagtctttgaacgggccgctggtgacgcagccgcctcccgtgccggtgggcaggtggatgaccgggtagttacccaggcttagctggatgtcgccggtggattctgtgtaggcaccgttgccggacattgacgtgtcgctgccgtcgaagacctgggatttttccaggttggcggcgtcagcgccccagttccagtaactgtggttatgttagagattagggcctaagttatgcggaggattgttagacttacgggaagtcgccagtgtagccacactcgttgcgcatggcttcctcgaagttccagatgtagtaccggtgccatgccaggaaggttccggtgtagtggatgccggtggtctgattgatgtgagtagcgacgaagtcgtcgtaacgggaccgcgcaccaggggccttatcggagggagtgagcgagggcaactcctggaggcaaaggatggacttaatgtaggacttcttctgcttggtagagaaagccctccaatcgcgacgaatgcgcagcttgctcaatgaacagccaccgcgcttctcaatgtctgagtcgctcgagacactattcatgctgctgttgtatgccagcccagccaggtcgtcaagctgggactcagcgaccggcagggaggtggacgcagcggtggaagtggcagcgctcgcaacggcactctcagtggcagtgggcatagcccacgcctgtgcgaacaaagctcccagagtgaggatggaaacagcaaccatggtgagttgaatatttgatcctctgaaagaccagcaagttccacaccaagggttttaggagagatgttgatcaagaaggaatccggacatgattgtcgatttaagctaaatacatttgccaatcacccctatctgggacttttgactcgaactaaaagatagtcgtgccactatccaatttttttccctgcctaagagtctccataatcgcgagatccccttgtgctgggaccatttagggcaccgggccaggttccgctttctccaccgccgggacagacacttccatcttctcttcgggccactcacggaccgaccctttataatccggagatcaccaagatacaccaagagacacgaagatataggagaaaacaaaaggtactagtaaacctgaagcaacgatatcaccaaaaacagccacctcgtggcccccttgttcctcccgaggtcagcggcttggcaaattcagctaagcgacagacccaatcacatcaagatctcaaatcgaattcagtcaaaagccaatgtcggaagagacacccgctgccctagctgggtaaactccgatgaactgtaatccaccaatgcaaccttcctctatacccgaggctcatctcctttcaggagctcttcttaccgaagtaccaagtctgctcattggccaagtttcgaatgaccaactaccatcccagttcccgggtctgaggcgtattctagaacatattctattgggttaaagcattcttctcatgctagcgttggaccaagcttgaacgccgagaatggctttgtgtcttattccatgtgcaccatcgcttatgaacagccgaaatgggagtgtcgacccgagcgtgaaagagatggtagaaacaggtaattggtctacggtctcgagtataatagatgaaagccccatacgaactcaacccacttgccttccttgggctagaaagccacaattgttgtcggtcgagctgaatgtaatctaaaagttatgacccgatgcactatggattaaatctgctaatacttttgatggccctgcccggtttgccctccctagtataatccctgattttgattcttcctttcaatgtcgagccctccataacttttacgacggtcatgtcggacagtgctcatagaggagacgttagcctcccagatgttaaccaagggcctagaattataatagccacggctatcaccactgtcgccgcgttgatcaccgtcttggctaggttctacgtgcgcgtattcctcattcgtaatgttggatgggatgattatacaatggccctaacgatcttgctgtctgtctgtggcttcgccattatcgtccccgaggtgaaatatggtgccggtagacatacagtctacgtccaagacacggccgtaacggcaatgcatttgaattatgctacccagggtatttacatgtgggctattggcctggtgaagatatcaattggcttatttttgcttcgtttcgcaccccggaaaggatataaggtcttcatctgggtggtcattggtgtgtaaaggcttttatctcttttccctggcccactactgatgaacccggtttatggcagtcctcatgacactctacactgcaatctgcttcttggtgcgtaacttatccccacatacgatcgcggacagcagttaacagcttgattcattacagactcttatcttccagtgtcaggatatccgatcaaattgggatagctcggtgaaatcgaagtgctatactcccacacagcttctgactctgagctatacgaacactggtgagattgatacgtacgagtatacttaagcatatcctaactgaaatagcactgaatattctcaccgacctgatcttcgcggttctaccggtctttatgctacggtatgcttcatggacatcggcttttcagataagagactaatacaataatcgacagtcatcttcaagtcaatcgccgagtgaaagcctctctaatctgcatcttgggcctaggaatattgtgggtgacttcccatccaaccctatcgtaaaccatactaatcattctacttccttcgcagtgcctgcgcagccgccttcgtcaagctctcaatccttcccaactacggccgaaccggcgacttcctctgggattatacgaacctcacgatatgggtcgtgtaagttatctatactacaagcatccgaaggccaccttgcaaaccccatactaaccaacaacagcacggaatgcaacacaggcatcatggccggcaccctcccaaccctcaaaccactcttcaagagattcctcggcacatacggctcgcaatcaaaaacgagccgccagtaccccggcagcaagaaatataagatgcactcaatgtctcgatcaaggggtccaccgctacaatcccgacataaaagcggtaatctcagtatcgccgagtacgacgccgagccgaacattcagcgctcccagattgcttcaacggcaggctcggcgacgtacgctggaagtcgaggaagcaattccagtgaggagaggatattgcctgttcagggcgatggcatcgttcgtacgactgaggtcatcgtttcgcgtgagcagaatattccagagccgccgcccagtcctcccgttgtttcgaagttgagtaggatgggatcgctgagtgggttgcgtgtcaatgcggaggatagggtttaattttgtattttgggagttatatcttgggaagttatatgtatattgatacccaaagagtatatagccatataggctgtgtttgggcggcaataaaagggcctgttgcccatttgttacacatcctactcaaaaaagctgatatctcattttcgcactggactagggtttgcaaacgttctacattcccgctcacggtccgatgaaggggcttttcttctgtctcagacatgatgtccgagtaactcaagttcggtcacatagaaaaatagttcgtatttggatatcaaggccagaagccagtcattaagaaggtggaaataaagtaaaagaacggaaagagccaccaggaggagctacctcaatttcacatccacgcacagccagggacaacagcccccctgccagcgacagccttctccccaaacttctcaacataccacttccgtccccagcgcgcatggggcaacatattcgtgacagcattggcaacaaacaccacagcaggcaaaggcagcggcacagcgagcttaccagccgcccatgcagcaggcaccaaccaaggcgcaagacgcagcggaggagcgatccccacagaagacgccgagacagatgcagggagagcagagaatggcgcaaccgccgtaccagcgagagcaaaaccaacccactccagccattcgaagacgtagtgcggatacaagatgtatctgaagacaccacgggaaggcgggatgacgtagaccttgtggaacttgtttcggctgccttgtgcttcagctcccgccggaggtccatcatctgtctttttggcagcgcgtttttcggcttcttcgcgccgaagtcggaacaatgctgtctctgagtagatgttgccggccattccgatggcaaacaagattacgcccacggtggggaggagattgaccaccgcagagcgaggagatggactttcgctgctggctgtttggaagtttgggatagtcgggacggtatatccacgcaaccatccggccagacaggctgaattgaaccaattgaagaccatggcgaaggacatgatgacggcgtggattggggacatgctgggggcggagaagaaaggggagatgatggctcggttgaaatagtggatgcagtacagagctacaatgaggatgttggacttagggagatcagtgaatgagggtgcatatggcgatggagtgaccatgctatatatcaagttgatagggccgacaatctccatggcagaccaggcgatacgacctgggacgttgaagatggactgcgaggaggtcttgcctgctggatgccaggacaaaatccattgaattactgtcatctaaattcaccgagttagtgttgtagcatgttctagggcttcagggtcctgaccagggggaagtattggaagcagcatagaactgatgtgtagacagtcggacttggggaaaagagctctgcagtggagggcagagctccccaagaagtggaaatagtcgcacccataattgatagttgaagagaagaagaagatcgcggaggataaacaagaagcttaaaagcttgtgatgcggaaggcggtgggtcccggataaggagctacacagggttcaacttctcctgcttctttctcctcttcctccttttttacttatttttccttctatatctttttttctttttttaaaaaaagcaaatagtttaaggagtaccgatcaaggggacagcttttggcgagacaatgtgaaaattgtcagctttaaggagtgtactacttcgaatcacagtcgtgcaaacgaaacccttcctataactacaaagggtatgacagcaggcaaattgcacagagtgagcgaattagcgacaggactgggttcgtttgatttctactcgacagaaagtcagacatgtaaataacctgggggcataattccacataaacggagtgtagcattctgtcccgtgaacgctaatggaaatgcccctaaaagagcaagcttgcaaattagatcataaaaacttccttaagtcgatgtgtccatccgatcatgcaccatttccctccgtttgccagctaatttctctgttttgaacgcctcgatcttggccttaaggtcggtgtctaagaaaggtggttagtagtggatcaacaactggaaaaaggaaaattgctcaccagccaccacatcttcgatcttcaatggaacacggttaaacggatcgtgggggtcgctgaggagatgcgagcggattgtggcgcggtcgatggagatccgcgagctgggaaggatgactgggtcgtccatgagtgaatacataagaggatctagaagattagtagctgtcgaaaaacagtgttcacataaaggggacataccgaggaactcttcagggatctcgcccatatcttcctccgcttgctcatcggcctccttggcagcctggaccttcttctgcagctgactccagcgacggagctgctcgggggatttcagtgaccacttccggatgatatcggccgccttttcgaaattggctggcttgtatgatcggccatcacgggcaacagccaagatgaagttttccttgttgatcaagttaagatagacatccacaatctcactcagaagagcgcgggggttaaagccatattcctgcaggttatccactcggaggttcgagctcttgggtcccaccattgcgtcaaggttgtagtccagcatgtctgccaatcgttgcacaatttcaggcattgtgaacgagtcagcaagcgcatcggtgaatagcttgagcattgatacggtttggttagtcagttgcatgtagctcttcgcgctgcgctgcgctgatgaaagatgctcttcccgctgctggcgggttgcatcatccattgagttgccctgtgtattcagctctgtctgagtgttgtggatagtcttgaaagcaccgaaggattcgtcgagtacataagtcacatcgttcagtaggaggttgacgaattggacgaagaaatccaggttctgattggcttgaatggacaacttctcccggtacagagtgttgggccagatgcatttgatgatctcgaagatctcgtaacgaatgttaaacttgtcgtagaattgcgaatgcgttcccgtgaactctgcctcgatgtagaatttcatgaccgcatggaggagatgctcgttggcaaatggcattgagttgagcaggtcgaccaaaacaccgctggcgccaccagggcgtttccaggtgcctcggaacagaatggagatcagtccggctttcaggtagggatttttaatataggcggagctctccaggaatgtgatgcagagcattactaactcatctccctgggtggcggtaatgatctgtggcatgcaccacatgataaacttgaagttgctcacaacgtcctccaagaagtactctggtagacatttgaagacttcaggctgctgctctggaagaggaagggtaacctgttccttggggaagttctttcccgagacgagtctcagaagccacacggtaacatatcgcatgaatagcatggaacgagcttgccagtgctcgtcaaacaacacaccctgcagactgtacttgagagcaatacccaggtcgagcttgtccttgtacttcttcagggccgtatcgaaggtgcgcaattgctgcggattgttaagccagcgaactcgctcgagttcgaatttagtgattgtactctccatatgtcgcacatctttctcgagttgctccatctttgacgtcaatgattcactgccgtagtgatgagctgcgacagtcaggaaaaatatttcagtgataaagtttgatgttccttcaaccttcttggagtagaaagcgtcggaagcatgctgatcggcattgattttggtctcatcccgcatgtcaactcgagaatcgcggtggagataatctgcatcgactctgtcgatcttggtgaatgctgcatccatgaatggctcacagagctgatcgaggcaagttgtgatattgaacatgaagccgtcagacgatacttgctccggatcgacctgcatcgcccgtcgtttgtggttgatgttcatagcagtagcgaaccaatccaaaacacggtcccgagcctctttcgaggcccgaatgagatggttgataacgtcaagaagatcagagctaagcatctgctgtgtcattcgaagcgatcgctgggcattggaaatgtaagcctggtcccgggttttgggactagagaaataagacatggtgacgttagcttggagaggtgagaggcggaaccatggacccaaaagagtggttttctcgaattgagcagggtccttcgtgttgttaaaaatggacgattccgtgattgcagcagcgatggaaccgtggcgaacaagatttcgaagagcctgaacaaactggtcagacgtggtccaaggaaattggggcgcttagcttacaatagcgtatgacttgtagtcatcgttaacattcatagaagaaagctgcgcgctcaactgctcgacggcagatatgaaagcaggcttgacagagtcgtcttcgtcaaatcttctgacagcctcattgataaattcgaaatcgattcctctgtcatcctcagggtcgatgagaaggtacgaggccaacgatgattgcggggaccattcgctcctatagtcctgacagtcagtatctagtgccaatgcagtggcattccagaaaaacgaacccaaacatctctggcatcgtaatcgcaaagatacagtagctcatacatagacgccgcgcctcacagagaacctgatactttgggtcctcatctcccgtccgcctcaatcccttgtacagctttgtgatgcgcttccagcatggcagcagatagtcaaggggacgctgtctctcggcctttgatgcggcctctaggagggcttgatctagaaccgcgacctggatgcgcagatcctggccctcatcctgcagttcagtccgaagtccaggtaagtaagtgcggttgccatgaatatcacgctgcccttcttccttgagggtcactctgaacacggcgcttagtgtccggtcttcgaaagcctcgatgctttcaattttctgaggtggaggggtgctcggggctgagggagcggcggatcgtggtcggtctggtgtagccgcggccggtgtgatcttgatccgcttcccctctgactgctgcggggttggtggcgcgttgaaaagacggctcggtggctgagtggacagtggtgaatgtgatggagatgtgttagctgagctctgtgccgattcagagttgctgtctccggaggcttggaccgggtttgagagcttcgcaagtcgcttgttgcgaatcttttttttatcgaaaagatatgtcagtctccgtgtcactgcgggggcgggattgcttcgtaatttgagcacaacaagtaactgaccttgtctgcgtcagaaagtgtatccgacatattgactccaagtcagacgataagcggtttttgaaagtttggcaagaccgctaatccggtggatcgggtcggcagaatatcaatattgtcgtgatcgtgtgggaatcataaggaggcgtgaaagcggaataaggctgctcctaagcctcaaagcgggggaaagtatagaatctggagaaggtgaacgagatgtttgtgattccgtgatgatcgccgagattcctttctgttctgattcgagattcagcgccccggggccgtgatcaaatttgactaagcaaatctcattgtccatggtaggacgagatacaggatgggtacttcttatttcaaggtctcaccacataaaactatgtacctccaaagtcactatctgtatttacatgcatggtacactcatcttagtccttcctatgaatgtattttttcatacgttgaactatcagatgattgaatatcaagtcaagcaataacagatttatggctacaacctcaacaaacaatactgtgatgtgatatatctccatgcatctcaaccggaacgtgacatcagagatgaaaccaaatgtcgcagtttaaccaaacctcggaagaagacaaagccactgatatcttagatgcattcgaaactctaggaaaaataaaatatacagctaatgaactgaaactcccatagatgccaccttgtggatgggctaatgatattagagcacgttcttttgcaaaagagcccaacaaagaaacaacatgccatgaaaagatgcggcgtaagcctccaaagtccacagtgcatttagtatctccccttcatcttcagttgatccagacgtcgacagctcggcatctccattgcacgagccttcttcatcttctcaacatcagggaagagccacccctgcgcttcttgcagcctcctttcccgctcatgggcttcggcgtcacattcattccgcagtgtcctgacatattccacctccacgcgcgtgtctagctctcggaagtttcgggcactaaagttatccacatcgagggggttcacaaagtaattgagattaagtttcggggtcgagcggccaagtgtatgcggggagacgggggtatcaaagcgataggagggtccggatggggctgaggggccagagaagagagaggagaggagcggcaggataaatagaatgataagcggcaatagttggcgaaggaaactgcgggcatcgatttgagcttcctgctcggcggctgctgggcgaggtctgcggcggggcgcctggcctccaaactgatgcactcggaaacccgggccgcctcccatgttgaagacgaattgcggaccacctatagtagcacacgattagttcaggtcaagcgaataccagagggatgggtagtagtaccgaaaccaccaccgcccattccgccaaatccaccgttgaagaaccggttgaacatctcctcggctgagacctcctcgtcgaatctcgcaccaccacgggggaaaccaccaccgccgaacccactgaagggggatgcgccgctcgaagcactcggtccgggctggaacctgctatcaggatcgccgccgaatttgtcgtacttggacttcttctcctcatcggagaggatctggaaagcccgtgagaccactgccaccgcgggtaagaatcaatatgtcaagagctgggccagggttggtcattgctcactcttaaacgcctcatctgcaccttcatacccattcttatcgggatgcgtcaacaaactctgtttccggtacgccttcttaatctcgttgtccgttgccgagcgctcgactaacaaaatttcgtaaaatgccgtaggctgacattttcggatccgaagcacggcggctttctggtcatccgtgtacttgcgatcctggttgccctgctgatggtcgcgcgacgtcgcacccccgcgtttggcgtcagagccagatgccgaagccgagggcatagcaaccgtagtttatagggaaatacgataaatcctaaacggcacttatttgctggtgtaggagggaagagggggtttgagagaatccggagggcgtatgttgtagggtggcgtgggaccgcggataaaggagaaacaatcccgcacgagatatggttggtctggcagattaatcaaacgtgcgatgagatggccagagcaaaatattggcctgatcaagatgcagcgaaagcaaagtgacaaggtgtggctgattcggcggacataaattggggaaaaagcgtggtcttaggtgtctttgccaagcgccggaatgtctggacactgcgataacatcacttgccgaactgataaaccttccaacctttccaagtcggtgatattcaattgtgagtgctgctcagacccattcagttcaattaaagcacaccagtctcattgatatacctgcagcaacctcaattcttggctgccaaagctccaaacggtcttccgtattcatcaaataagtcctgcttcgaagctcaatacctcaacatggcggacgattcaactgtcgagaagaccaagcagacggtaatccagcgcttccgggcctggggtggtaagtggcctacgaatagcctggcgcaaccgtcaaggcaagcaatgtcgcaagtggtcactcactgatgtcgtttctcaacctagaaaactcattcccacccacgttgctcgcctccatgatcacagcccagcacatgcgccccttccagttcttcccgatgctcttcccacccgtgctgattttctccagctatgccaacctacagggcttcaagacggacactgccggcattagcgcagctttctccgggctgtatctgcttctcgcagcccgccgtcgacagccattcatgaagaagtttggtgttcggggcgtcgtgcgcggtgcgactatgggtttggctttggtcaacatggtcggtggtgggctggcgtacactctaggtaagagggaagaggaagaggatgcgtcatgattaaggtgccataactatgcgaagatcgcgttgctgtattggtgtcgcgagctgtcctgtacaatatgtgtatcaaaagtggtttagttgtgcgttttgggaaatagttgacctcaggtctcagtgtcagtgaatatgggtttatgaattattcatgcattatcattatacaagttggacataggctgtaggagtctccctagttattccgtctatctacactttggaatttccggaatacgggtgctccgatagcacgaaccgccgcacctcttcagggaccaagcagtcgaggtcctggggagccgattgcagcgcctcgcgggctctagttgaactcacgggctggtcagtaggggtacgaccctcgacaagctgaatccgctcggcccactccctacgtgcaccctcgtcatctcggtcccctctagcaagggctgccacataccccagctgctcctctctcccgccccactcatcgctcggccgcatagtcacacgcagcctgtgctttgacaagaaaggtctcagaggtttcaaggtatgttccggaggatagtacttggaattgaagatccggatcaaagtatcgtaacccgtaagatggacctgctccagaggcacagggtaagaatccgatgtctctatggcagcagctttatcgataaaatagggcttttttgtgacgccaatatcaatcaacgggagagtttcgacagcatgtgtgaatcccgaggcagcgaaggccggtgccgatgcgaggtgggcacggagatcccgagctaacagctccatcatcacgagccggtcttcgaaggaagctggcttggatggcttgtccgcattctgggtcgcgagaaggaggagaacgcgagggcggggctggggattttctagaagtgccgtggtgacaatgcggaggtgggcgcgggtggggggattgaaggacgaatctaagacatagagtgtttctgattctgcggagtgatcgggcgggatggttgttaagacctcgaagtctttggttgaggttagaaaccgcttcagcagtgaggcatactgggatcggagggcttggaaggacatgtcaattgttttaactccacgtcataggtgatctataaggttccaaggttcaaatgttgtgatgcgggatgcaggtgtcacgataagacgtcaccgtcaccgccttcgatatcgagatcggcatcccaagatttagatatttccagaagatggctccagcatgcgccatggttcacagaattgagatctcctcaattatgagcaattcctagcaatttgctaccagtccctagcaatttgcggagttgaggaggggtagtagagacaggggcgaaatctcaagtaggatgtttcatcttggaaagcttctccgtatcggcatctcaattctgtgcatgacagggatgatccctctccacaaacaaggctttctgaattctcgcttcggtgctacgggaaatgaaacactttgcaaacgaaagacccaaccttggaagtacaagggccgtgctggtagccctgcctagacctctttgatcaatttcatccgatacacccgtggacggcagatttgatcaatgtgccccaccaactccagtatggacggcatttagagtgaattgtgtacatcttcatctttaacagtatgggaaattagtagatagactaccccgtggagtccagaatgccatctttatttcaaagaccaatttatatcccgaaaaatggcgggaagcgggggaccctgggacacggcagcctgatttatgtgaaacccacggccattgtattgtgtatcccgtattattacagccgagtagagtcggggctgaacattaaagctttcaattccttttcccgtatgttccggacacctagccgtattgttctctacaatgatcgtctggattctcggactgtgtttccccattagcatctacattgtagacgggcctatagaagtggccccggatattgtcagactactctgatatatacgcgtgcatgtatgtccgtgccctaaaaagccgtttggggacatgctctccggagtacaaaaggtacacaacatattccatacaacataagttcaatgaccccctattaagcactctatcgaaaatgatatgtcgatagccggtgacgccaccaacgccacctcaccttaataggtcgcttaagaggctcataggcaacaatatcatatgagatttttatgtgagattaaaggtcacagccccggtgcccacgggctcgggataaatgccaatggtccaatgagatgtccgttcctgagacagtggagatgcatatttaccgtcgatccaccggtattaccgacatttaatggaatggattttaagatactcccgtactacggaggatttcatagtataatattaaattaaaatcgatatcgatgatttaatttaaggaaattaaggaaattaaggaaaatgagttaattacgtgggctctcttttcttctctcttctctcttctctacttcttcaagcttgttatctcttgacttcttttccttctctgtgagaagccatacgttccttccctgcgaattgatttcgcactttgctcagtcgctctttcctcaacacactcacttaaacaactcgctaaattcccaaggtcgctcgcgcattcttgctcttgacatctctctcatcccaccttgactttttcttggtatccaccgtcgttaccaataacttcatcatggttgtcttgaacaagttctccgttgccgttgtggccgctctggctgctgtgggccaggccactcacgagggtctccatgctcgtcgcgtcctggctcgctccgtcacccctggtgccgaagcttcgacctcgaccgtcctcgttgtgcccactgctgccgagccagctcctacggcttcttcttcttctgccgtgtctgctcctgaggaatcatccaccgtgcagtcttcttctgctccctcggtggcttccagctccattccctccgttgctccttccgttgctccttccgtcgttccttcctcttcggttgtttcgacccctgctgtgagctcctctgtgcctgctggctcttcttcgcctgtcgcttctagcagcaagcctgcggtcacccgcactcccatcagctcccgccctactggtcttcctaccaagtcctcttccggcgtgtctagcagtgtgtccgctcccgctggcactgacgtccctggcgatggctccgttactgtgacctacactgtgacctctggaacttccactagcgtcattaccactaccatctccaagactgccactcgggagcacaccgtcactgccgtatgtgctcttctgatatcttatgctttgtaactttgagctaactttgatatagacccagtctggctctgaagcctcggccaccgagtccgctggggacatcacccgcactcgcacttctactatcaacagcaccaagaccgagaccgtcactatcgttgaggttcccactccctccggtgaggccggcaatggttctggttctggttcttgcggcgctgttaccgttactgctaccgtcactgagactgtgactgctgtacgtgttgctaattcccttaactggcacatcaaaaattaacattcttttttttttctagggtgctacggagacccagacccccggcaacggcaacggcaacggcaacggcaacggcaacggcaatggcaatggcaatggcaatggcaacggtgagggcaacggtgagaccgtgtcggagtccactacccgcccatacaccagctccacccgcattcccatcacccgcactcctactccttcttccagcggtttcgccacccggactccttccgctagcgccagcatcaagcctatcccctcctccagcggccagccatcgcccagcagcacccccactggcaagccttccttggccaactggcgccgccacttcatctaaacaacacactgctaaggtgaggggaggctccacctccacatggcagcgagttgcgagcttgttaatgatctgagagaaagttccgatttccttctactcgcgcagaggcgtgctggtactgtacctatttttgacaagtttcggtacatacggtttcgatttcacttcttatttacgctccattttttgccatgtttcttcttttcgacttcttctattcttgcaatggtcttgtcatgccggattgttctgggcccaagctttccctgcctgcttgtttacgttttgcaggcgaacctcaattctagccgcggtcctcgatcttcaatactcctggcgtggcatttccttgcgctacatttttactctccaatgtgaaattgagccattcaccattggactcggaaccttttctttcgtatcgtcttgacgggtggtgacacgtctgctttgaggactggatcttgccccttttctgttgtgaagggaaaaaatccatcttgcgtgatctttacagatcttcattttgcgaatgatctttgcgttgttttttcgtcttcgtgtctttctttccgtgtcgaaagccgatgctgtgagcaatatcggtatccaaggttagaaaccctgaattgacttgaggcatttgcctgtttaccaaaaaaatatctctacttcatttgtaagatacgtaagaatgtagtggacgaggctctctatcccggagagcttatagtaaggcttggcccgtgacggacctgtcgatcagtgtcgatcttgggctgtgtcaggaacaacacatagggacgtggatatatagtatagtagagctttgagttgatatctcatgtcatttgtacattcgagagtattaatgtacatcagaataatatacagaattcgaatatccagcttcattcctagaaggcatgcatcctcccatcatcatcctgcctgcgccactcagaatgaatgttgatatctttatggtatcgaatccaacgcttcaaccccttccctcacaacccgctcccgcataatctgccattcaacccatgtcacaccctgcaacaaacaatccgccagatcatcgagtttccccggatcaacagcagccacctcgttcaccatatcagactgaggggatacacgcaacggaggaatagacccactcttcaaagcacgagaccccttccctttccccttcttcgacgtctgcgtctgaccctgccatttccgcatatacgcacccgcaacaccatgcagagcaggacactcggatttatccgcaagcactatcttattgtcggcagcaatacccagcttgtgcttcttcataccccctcccgtctccgggcaagaattggtaccccgcatcgcagcagaaagccaccgtccaacaagatcgattttagccttcttcacttctcgagcattgggtctcttctccttcacctttcccccgatttcggatttttccatgtctcctttccccgaatctgatattccagaaccaccttcaagccaatacctcactacccgtctcggctcaacgcctcgaacaaccaaatccgcaacttccccgcacctctcctgtcgaagcgtatgcagaacagcgtacagcatgccctccaacaagccaactcgcagcgtccattcaaggacggcactgcccccgcccgagcgaaagcgctgacgctctatgagcacatgcgtggggcggtatgcagctatgagtgatgagattagggtgtaggcatttgcagcatagaggtcaggcgagaaggagtctttttcttttgaggattgggcgaccttggcggacgggtctttttccgtttctattgggagattggattgggatgattccatggcatcaccagatcctgatattggttcgggtttgattatactggtattatccccgggtattaggttcaaactcgatatatccgaaacagcgagtcggtgccaggccgttaactctgggagtttggggttcgctgcgtctatcccgacacctggggtcccagagcggggcactcgcagatgcgcgaatgcgagattctgaacccccatatcgatactgagaatgctccatggttgcgcaggatttgatcttgacaagcctgccgactcggtctgggtcttggtcttggtcttagttgaccgagtttttgtcgacaccagccgcagatcgacccgtcgatcttggcttagcccggtggtggcactagcactggtactggggttggcattgggactactagtgataccctctgcaacaccatccgcggcagccgacaactgcaactgcaactgcgcctgtgaccgtgaatgcaacgtcaactccgctgcaatacgctcaataagaacacccttcgtaccagatgattggatgcccgttgcgcgcgcgatgcgctgcaattgtgctgatttcaaacatgcaagccaagggtgggttggggagtacagtgctgcagtgagacgcattggggggtttgtttgtgtttgcttgccaagggtggcattgggtgcggggtctggacttcctggtacaggcacaatcacgagcacggtaaataccggatttccgtgtctggctgtgcggaagacctgtaacggcaattttaggctggatgcatgggctttggaaggggatctcgggattcttgaaggtggattgctgatcggtgcacgggccattgacgttcgcggctaccgtggcactgggtcggattgagttcgttacttcttggtatttccagggttctgttgggtttagtatagagtagactgtcatttgttaggacctctactaatagttgatataacaaataaatattatatgcgccttctatttcccagacaaaatataacaccgagagccccttgtgtcagtaaaacggtgtgaataataaaactccccccaataagcagtaaatgcaaggcgctgaaaagcaagtcaaccgaaacattcgaaaacagcaggtaaaaaataataaaaataaccaacaccgaaaatccaaagagcaaagagcaaaagaccaaaacaagagcagattataccaatgctggctgtccaagctccaccattgcaatctcatctcggaggtacaacaacggagcccaaacacgccaatgcagcacgcctatatgagcaagacgcatcccgatacgctcgatatccgactgctgtggcgtcagcaccagcgaggaagtgctcactgatccagacgcacccgcagttccagtctgtggcgcagcaggacccaaagcggcagatagaggagcccgctgagactcacagatcgccaacggtgacagcggcaagaatctgcgggccgccgccagggtggtagcaagaatcttgctacgcatgctattttggaagaagatgaagagatcggtctcgttcgagagatgccattcgagcgcttcctcaatgggaataatgacctcgtccgcgacgacagggtcgagctgcagcgcggcacatgcaaagcgggcaatctccagtgcaatacagcgcatattttgcgtccagcgctttccgccgcggtggtcgggatcgtcgtcgttgttatctgggttccccgcgacgcggttctccaggtccatgccgtcttccattagggaccagacgcgtgaccggaaggtggagtaggtttcttctggcgtggagagataccgcttgtgtttgttgacgtaggactcgaagatgtaccaggcgatgtcgaggttgattaggttttgaactgttgagcggagttgccagaggcgctcggagtcaaagaggaaggtttcgggaaagtcaacgggcggactgaattggaggagttgggcggagatgccgcggaacagggcttcgaggggtttaagagtgtcttctgtttctggggttggagttgttttttgggcttccgcatttgcatcgtctcgacgggcttgttcgcgcacagataggtaccagtggcgggcggtttcgacctggaagccgccgcggttcatcttgccttggaagtattcttggaggaaggggactgtgtcttcgatgaggagaacgcggaatgctcggatctgatggttggcgacgtcctatcaagccacgaattagttcggaacgttgcaagaacagcaaggggtagatatgacataccaacttcatcgcctctaggattgaaaataatgttcgcaggccgttgacaatctcctgggggtcctgggagtgtgaacccttttcgatttgctcgaccatagaatctgcccactcatctcgcatcggagcgcaatgtgttttcaggagtttcgccagccatttggccagcgtgagcatgtcgagaacgcctttgcgtatttgctgcatcagtagtgggacttccaagttctgcatgatagttgggtgatcccgttccggaacaagggtcttgatgacgtcctgcaatgtctcgaacagggcgggcaaacggggatcgaaggtgcgtcgagtaccatcactcgactcgacttcctcggtggtggcatcggcagtcgcagcatggtaagagtagatactgatctctgcagccaaagagtcccaataatcggcggcttctttccgcttgcgttggcccttctctccgtctaggtcaggcttgaagtgcaggtcgcggtcgaagttggcgtccatacggaggttgatgttgctcatgatacagggcagatcaagctcgctgagggtcttctttgtaaccggtggagatcgccgagccttgcgcaataggcgcagatcccgggaccctagtcccaactcttggggtatactgatagcttccggtgacggtgagggctcccgaagccgagtgacagcagctggtgccggcggtgcagattgtcgagctccatgaggataggcgaagggttgttgacgacgacggagaggatgaatggaagatcggtcgtcacgattgtgagagtctcgcccctcattcttgtgatactctttagaacgaccacctccagcaccatatgcctctagagggccttcagcgccctcctcctgggtccgggcttcttttgtgccttgtagatccatcgctaatcacggtatatctgaacctcccctgctcagacagtcagataaaaggaagattttgggggtggcaatggcgagaccacgccatgcgcctaagcacagaacaaggcgaatacgcccctatgcaactcccactcacaaatttaataaccccctgtttgcctcaggcaggcagccaatccgcagtcaccgaaaagtgatgcaagtgagctgtcaattcctgtggagccgaggattgcttggatctgcgtcgatcgcctcgtggtttccgatcaggggggttgcagggtagggaggaactttggaaggtaaaaggatagcgggtggaaattagaatattgaaacacaccgaaataaaaaaaaaagaagtgtataagaatccgattaaaaagagaatataaattcagaacaaatagtgtatatgagatcccaaagcagaaaagggcatatactcttaagagagcaaacaagaccaaattcccgagagtaaaaagacacaatggacaaatcaaagaacgaaaagaaagaaaagaaagaaaaggagttggcaaagcgaccgggatgaactgatatagtgagtgttgtatcgcatctacaccggattcggctggacgcaaccagacattccctatgctgctacccgcgagcagcccccccccgactactgggtatatctcgacatggtcacatctttccatttccgattgaatcttgttatctgaatttgatgtcctaggaaaaaaaaagaaaagggggattagtcgcctcactttgaaccttgaaaccagcactggccacgtgagagtctccttttctcggggaaccactggatgcagtcgagttgcgcattaccaactactccgtactccgtacatagtcccagcttggcagagaagagtgcagagagtatggagtaagtaagtacgaagtatcgaggagagatgaagcagggcccctctcgtcgagatcggaatgtttttggttcatgtcttggcaacttgatgcctgattgcctaattatcttatgcctgataaacaaggccttaatattccttggcaaccctgtacttcgcctaccttcaccacttaactcccaccaattgatactcactttcatctcggatctgaataaaatcaccgtgattcaggaggcatctactgcttatagacggatatcagctccgtggatcttccaactccactggccatgtctttggccacaataaccccaccggccttattgacacccaaatctggctcaacaaatgcccgctcaatagctcaataacgccaccatgtctaaaaaggaagagataaaaaggaaacatgatttccacgtggaatctgatctgcatgatcatcctacatctttactacgcaatatcatctcgattacttgccgaagggaaaggatcatcatagctggacaaagcgcgagttccaatcatgaatatctccgcactgctatacttctttaatgtcctatgggcagcccctggctttgttctctcacgagcaattgcttcatacaatactgcacggttcgaagtacattccttgccgggcgtttcggaccttccacccagctgggctggtcgccttccggttccggggacggcagatggaaatgagatattcttttggctattccagtcagagcaaccggcatatgatgacaatttgatcagtaagtctgaataggacaggacatgcaaaggtggttgctaacagagttgtatagtttggttcaatggcggccctggttgctcatccttgataggtctaacgaccggcaatggacccattacgtttgatggcaattcaactgaattcattcgcaacccacactcgtggacaaagctgggcaatgtcctttacgttgatcagcccgtcggcactggctactccacagccagcttcccttacccggttaaggacaatgaccgggtaacgacggactttacgcagtggctgcgtggcttcttcgaatacttcccgcacctccagaaaaagcagatccacttaatgggggagtcatatgcaggcatctacataccctattttgcatcagagcttctcgagggtaaagattctctgcctctcgatgttcgttcgatgtcccttggtgatggatcttggggaaatggggcagccatggcggctgttgcaatgggcaaatatctcaggtcacagttgggcctccttcaaattcccgaagacgttctatctgtcttcgacgaggcggacgaaacctgcggcttcaacgacgtgctagcagaatcgaccatataccctcccgaggctaggattcatatccccggaaacccagagtacttcaacctccgacgtcgagatctagcaagtgccgtcaacgcggcatgcgatatctcacccacaaccccggaagaagtccgcacctcgatcttcaactcaacctgctacggcccctgcgccgtcttctcaacagcaagtgactacctaacagccgtctccgccaaccgcacaacccgtggctgcttcgacatctacgacatatcccacgactgcagcgccgtttcagagctcccactgatggcagagtacttcggccgtgcagatgtccagaccgccctgcatgttgataacagcggactttacagcgcctgcaattccacaatcttaaatacgctcctctcagtgccctcgcccgtgccaccggagtacttcatcctcccatctctggttaccaaccacaacatctcgctccatatctactcaggcgagtgggatatgttgatcaaccactttggcgcggaactctcgctgcagaatatgacgtggcgtggtgcgcagggcttcgcgcagaagccgagtaagccgttctttgctgataatgctgcgccgtcggcgaccaagcagcttctgctcgagcatacgcccgcgtctactacgctgtcgaccgccactcccactgctgctgctgtgggtacgtggactgaggagcgtggtgtgtcgtatcatctattccgtgaggctggccatagtgtctttgtgaacaaaccacgcgagatgttttcgtatgtgagggatgtggttgttgctccgagggctggttgattagggcggctttgggcgttggggctggcgaatattgggcgttggtaatcgagatcggtttagaacatgtacttttttttagaatttattcctattttcgaaattcaaggtcaagttagtatttgattaaatgggtcatgccggactcgtaacaataacggtaatggaaagctttcggacgatgtcgacaaaaatagttgcatcatataagaaaatcaccaaaagcaatgtgatctctgggttcaaacggagttttttcgtcatgcctttgtttcttcgaataaaatagaaatatcaaaccaattacttactgcagtatcacgctctcttccaagagatatacatccacatttggttcgttataccaattattttgagtgtttcggccgaagtacttgatttctacatgccatctaggaggaataccttgatagtatttatactcagttcagtaaacagcaacgatagtattacattcaatactctaatcgagttgtcctcgtagtatgccgtctcccgtctagaacgaccacaatgttactagatctagatctccattgtagacaagcacatggataatattacgatggtagaacatgtatgtatcaagagcaatttttagtcgaacttacgtcggactggtcaataggtattgatcggcggtcatcatgaaccagcatgagtcatgatgtatcacgatgaccttgggagggccctcaactatatgcttggtttatatgtcaataccccttcgacggaatggtgaaaagagtctgatgattctacttggttacttcatgcagttattgaaagcatcgaaaagtgcagttacctggctgcaacaagcattagggcttttagagtactggccaaaaagaaaggtctccaaagcgaaaaagaagctggatgaacgtcgtactgccacatataaacacacaagggcagagattgaggagacctggttagggttgtgggaaagggaaatagcgaggttcgattggctggtctccattaagcagagcaaaatcatgcatacccctatggcagagcagaggaaagccgtggatgcgtggatcgcgaatgggcggcaggagaccccaactgttgaccttcctgggacgagatgcgtcgctgtcgcctgattgactcagaggccgtgaccactgccagatagtttactcttctttcttttgatgcaattgaactatttcacctgttggttatagtaattttaaatctaattatattcgataaaggtatatgtgcgagtttcaaccagagagttgaacctgatgtgggaagcgaggcaacagcctatttaaatatgtgaaaatcgtgtgagaaaagcactacctaggtatagctgatccttgtagtgaccgaagttctctaatgagtgaaggcggtccgaaacatccctgtctcgctaatatgagtcatttttgtgccacgttcatgttattagagacaataccccaagcattgaatcgaatcgaatctcccttcactagttgtacggagtatactcggaattcaacatggctgatccactgaccagatatacccactcagccgcctttgatatagggaaattgccggtcagcgatatccatactctacattatgagcaatacggcagacaagatgggaagccaggtaagatacctttgataaagtagacaatttacccgattccgcgtactcgattatcattgaccacaccttgagaacgtctgaaaagcttgaatggcaaatataataacgtcactagtcctctacctccacggcggacccggcgggcatacctcatacagcaacacacagtacttcaacccagccatctaccgcgtggtgctgttcgaccaacgcggtgccgggaaatcaacccccgcagccgaactacgcgagaatacaagtcaacacctggtttcagatattgaagtgctacgcaagcacctccaaatcacgaaatggcatctcgtcttcggtggttcgtggggttcaaccctgtctttgctttatgcacaagcctacccggagatggttggttccctgatactgcgggggatattcactgtcaggaaatctgaactcgagttctcgcgtggatccattggcgcagcaaatatcttccctgaagcctacgaagcatttgtcaattatctccctgaaaaggatcgggacagactgaatgaagcgtactatgatctccttgtttcggaagattacgagacaagagttgcagcagcgagagaatggaataggtgggatttaagtattgggactttgagaccggagcctgaggctttcgctcaattggaagatgacgcgtgggtgcttgctcatgcgaggctcgaggcgcattacttcatgaacggaggcttcctggaagaagatcagattctcaagggggagaatttgaggcggattagccatattccgagtcagttacttcctactcttggacaaaatattgtgtcttgagctgggctaactcatcaattatagccactattatccagggccgctatgatattgtctgcccgccgcagacagcttgggatctgcacaagggcttgccggactcgcggttgttttggactcctgatgctggtcacagtcctagtgttagtacactatctgcctttgtttgacctggtttctgagacatggccatgctaacctcttcctaggaacctggaacgcgggccaaactgttcgaggtctgtgacgagtacgccgagcttgactttactcactgagagtggttggataattggctacatcccctgtttctgtccatacgacattccaaggttctcatcgcagttctcccacaatataagaactaatttaacatgctactcgtacattagaagagcaagcattctcactccaaatcacagaaaagctacaagaaacacgaaatattgtaaattgtaatattgacaactgattctacacgacaatagaaacagtaggtcaaattcgacaatgcaaatttgaccaagcaaggttgtagagcttgctgtgtgtggaaaaccacacaatgttgaaatggtaaagccagcaccaaccgaatatcacaacggaagtaggtcatgatgtcggccagcgccagaaataaatcgtcagtcatgttgaaactccaggcccgcttttggtatcctctagaaaacccgttgaaacccatatgttgaacttttggtatcatcgtcgtaactcatcaataaagaaaactcctaccgaggcgacaggttgattgtcgcctcctcattaaattaatggtaaattgaaagaatttactgcgcgtacttctggcggaagtacttggcagcgttgaccatctgtttgtgtttgatcagcattttgtacctcattttcaaggaaattgccacttcttaccgcggtgagagccgccttggtctcgggccagccacgagtcttgagtccactgtaaaaagaagcatattagcaccaacaaccaaaaaaaattcgaatttcgagtcaggatgacgaaccactagatgatatgttagtaaaaaagtatatagcaggagggtggggaatttacgcacatcagggttgcaccataattgctgaggagtcaagtatgccagcatctcctcgatgcggtccttgatctcctgctcggtgggaacacgaggggagtgaatatcgtaaacgccggggccaatgtggcgagggtaggcctcgtcgatgaagaccttgaggagcttagcatcggacttgctgttctcaatggacagaacatcggcatcgagagcggcaatggcgtggaagaagtcctggaactcagagtagcagaagtgggagtggatctgagtgccatcagtgacaccagcggtggagagcttgaaggagtcaacagcccacttgaggtaggcgacgcgagcgtcaccagcgcggaggggcagaccctcacggagagcgggctcgtcgacctggatcacagcgatgccagcggcctcgaggtcaacaacctcgtcgcggagggcgagagcaagctgctgagcctggacagattggtggacatcgtcacgggggaaagaccaccgcaggcaagtgataggaccagtgagcatgcccttcatgggcttgggggagatggaagcagcgaacttggactccttgacggtcataggggcgggacgagagatgtcaccgacaatgatagggggacgcacgcagcgggagccgtaggactgaacccaggcgtgggtggtgaaaacgtaaccagtgaggcgctcaccgaagtactgcaccatgtcgttacgctccggctcaccgtggacgaagacatcgagatcaagctcctcctggatcttgacaacatcctggatctccttctcgatgaacttctcgtactcttccggagtgatctcacccttggtgaacttgttacgctggatgcggatctccttggtctgggggaaggaaccaatggtggtggtggggaagagagggagcttgagggtcttggtctgctcagcgtaacgctcagggaaggcggacttgcggttgtgcatctcaggagtgaccgaggcctggcgggccttgacagcggggtcgttggtgcgggcggaggaggcacgggcctgaacagacttggcgttggcctcgagctgctcgcggacagcggcggggccttcggtgacagccttggcgatcacgacaacctcggcggccttctcaacagcgaaggagaaccagtcgcggacctcagcatcaagggccttctcgctggcgagagtgtgggggacgtgaaggagggagctggaggtggcaacaatgacacggtccttgccgagcttctgaatagcgttctcgaccttctcaatggcggccttgaagttggtcttccagatgttacggccgtcgacaataccggcggagaggacctgcttagggccgagagcggcgacgacagcgtcgagctgctcggggttgcggaccaggtcgatgtgaatagagtggaggctctgcaggtcggcgaggacattgatgttgtggacgatgtcaccgaagtaggtggcgagagtgatgcggggaccctgggcaccgagggcaccaatcttctcgtacgcaggcttgaaggcggccttggacttctcagcaaggtcgaagacgaggacgggctcgtcaatctggacatcctcggcaccagcggccttgagcttggacaggagctcgacgtagagaggaaggagcttgtcaagcagagagatcgggtcaacggtctggtcacggtcggccttaccgagagtcaagaaggagacgggaccaaggatgacggggcgggtggtgatgccagcggccttggcctcaaggaactcaacaacgggcttgggctcggcagcgagcttgaactcctggttgtcctggagagtgggcttcacgtagtggtagttagagtcgaaccacttgaccatttcctgttgattgagtcagcctactgaatctggacacgtatattgtaatcatttgcacataccagactgggaacatcaatgccctccttctggagaccacggcccatggcgaagtactcatcgagagggttgaggttgtacttggagtaacgctcggggatggttccgaaaagctggtggtggtcgaggacctgatcgtagaaggcgaagtcgttgctgggaatgacatcgacaccggcatccttctggatcttccagtgctccagacgaagacgcttaccctcagcgaggagctcatcgcgggagatcttgtcagcccagtaagcctcggtggccttcttgaggtcacggagtcttcccatgcgggggaaacccagaatagatctatccacgtagtcagcaactgtcccagcaactgctcataagagaatcgagaaaacatacgattgaaccattctgatggatgtgtgtgaaaagggggaaagaaggagggggcctcaaggatagaattttcacaaatccgattcctttgagagagtgagtgagagaaggaaagggaaaaggtctgggaaatgtcgaaagaaatatggagggggaggaaatacacactaatcccaatggaggattgatccacattcaagttggaggggcatcaatacggtatgatacatggtccagtacctccacgtacccctcttgtacctggaatccacagtttttgggcagaatatgtggaaagttgtgtaatttactgttattttcagtcctccgccagtatcaataccccatgatctccgtgatcggtcccccaatggatgatcacgccattgagacaccgataaggcctctgcagattgtttacgactattgccaattagtgctttttctttcctttttttttcagcgagggccttatgtatctatcgtatgtcgtatacacaaatctataatttttctcgattaatgagcggtcaagaccactagaagtacatcaaaatgcggaactctcagggagtacggggcaaccgctgtgtgacacgctgtcaattgactccgccacttaacctgcaggacaagctgaattgatactacatatgtacctagcgagcaatgagttgacagcttcatttcttccgtacgaagtaattttctagtcaattcctcatgattccctccattttccttctaaaaagataataatgactcagaacatcccctaacaaaccccggtgtcgggttccattcaagcaattgatcggcccacgtgatatcctgataggaaaaaattagttgagcatgaatggatgggtttttttttccgtaaagggaaaaacagaaagtcattgtgaagcgccaagccttcaaaagacagagaaaaatagaccattatgatctttcctcgatgttgttgcccttgatacattgaactccccgcaaaatgttcggaacagcgaacatcaggcccagaactccgatggagtttccgtgactaatgaagatgattgtgacctccgaaggcttggctatcgctctgtcttcgtccgaggctagggctcattcaacaatttggcctgctccttctaggccttgaattgcgttgggggaacccttgtgcttttctgtatcgccctggaggccgcccgcctgctatgcatcttctccgtttcccgccgcagggtcagcttactatgtactaagctttccgatccgtcggagacggtaaagtcggccggttcatctcgttcctcgttcccgcatggccattggttgcatgaaccaccttcctcgcaagtgattcgttcggcgtcaaaactacttgatttcgaagatcatcgtgttcaactcgaagacgagcttcctatatgaaactgcctacgttcgaggctgctctatggcatgcgttatctagcctcttttcctggccatccctaccgctaaataccatgcccccgcgcgcgtattcccttatgtgtgactgtgtgactgtcattatcatcgataagctgctcaacttttccatacctaccttccatcagaaaagcctgctactactggttgcgctgccagtcgctgtggctgtaggttattctctagtcactatctatgttattccggagtgacaatctagagcgacacagcaaaatattggataccccttcttccccacaataaacgaaaattgaaggcctttcggacccagccacgtctaggctctgtcttgtgtagtaagaggcacccaccatatgggcttttgcttcttgtgggtagcgggttagctgtccgggggtgtaaagtctgcctctagaatcatgaaaaacctcgcctggtaacaatattgctcctagaactctaggtaaaatcccccggaggcagccacaggttctcctggagcgagtggagtgattggttgattgattaatcaatccatagtctgtcttagccaccctactattggcagccatgcagcgttcaactataaatgcaggtgctcccatccttcgccttcaaaaattcgatccctccttctgctccaaacagttgcacccaactggtagctgtcctcttaactttcaatgctagaaataattaacccaccatgacgcagttatttcgacagcagtctggttatccgaaaagaaaatgccttcactcaagcccgcctaccgagcggctttcctcgagcggctttcctcgagcggcagaggctaacttcaatcttcgacctaattacgaccttatgaacaagcgaatccgaattttcctcttttgctgggcctcctttactattgccacgtcgggactcacaatctatcaaccgacttacaatttcaatcttagatttacgtgagttattccagcttgaaaacagttcatttgctaacaaaggcaaaagatgtacgggtgaaacccagctactaaacattccattggcggtcgtcgcattcggcatcttcgcgataccggccgtatgcaaccagccatcccacttggatccatgattgtgatcctggcattctacggcgtgctgtatgccttcccaaacaatagtggtgcgtatgccgcgacgactatcgccggaggtttctcgactgcgtagtaagtgtgacctagattgagcatttcacattacgtcaataactcacgctaaaacaatccaggtataccgtgatgtgaccctggcgagtccaaaccacagagggtgcaacgagatctgcctttgcaatcgcatttgcgaatagttatggcccgtttggagggatgtggggtctaaactgtttaattctcgttcgcacccacaatatgtgacttcctttggcattgcgatgggatttgttgcatggctatccttatgaaccgaaccttcttgggatttcacttggcgggtggttgttgatacgagaaagcagaagagaattcgactggcggcagccaaggagatccaggctgtgttgggtgatgttgatatacatgcagggaagaagaaataaaggtaaatatatagacttagtgtagtagaggatgaagaaaagggcgacagtgattctcttttcatacatactaccgaatgaacctgattggctagaggggttgaattgagtttgctagtccagaaatacctacctaggtaggtattaagcttgtattccaaccttggaatggcatccacggatccccggttgatttagcacatgtgtacctaggtacccaggtagatttcaacatgagagcaagcacatggtcttccagcccttcactgccaagtgacatcaactgtgggggtggatactgatgatcatttccgaaagcgttcaacttcccctcagcggagaacagcttgaagttcatttccgtttgaacacttctcacgttgacactccgccactattcaagcaaagcctacgcacaatggcatttgcacgcaggttagcgattatgcctggcggcctgggtaggaacacgagccacaaagccagacacaacgggacctaacttctccacaggcggccttggatcaagcattggcaaaaggttgagacaacaaggcgcccgtctcgccattctctatgcacctttcgaatctgcacgtcgcgatgagcttctcgaatccggatacggcgcgagcggcaacctagacgacatccacacctatgaatgcgacatcacctcaccagactccgtgcaggcagctttcaactctctagagaaacaaatgatcgacccaaattcgtcctctccatccgacagagctttcccaagtatcctgattaacacagctggatacgtatccctcagcgacatggagaccacacctcccgaagaaacactgaggcacctgaccgttaacctctacggccctatgctctgctctcaggcatttgctcgactctattttgctgcctccaaggctgccgagtcctcaccgagtcccccaccaccaggaagaatcgtcagcatttcatctcaggcggcacatgccgcactgcatcggcatggcgcgtattgtgcttcgaaggctgggctcttgggtctgacgcgcagtatggcatctgagtggggtggacggggtatcacagctaatactgtgtctccgactgtggcgtggacggatcttgggaggaaggcttggggggaggcgagtgtccgtgatgccttcttggcaaatataccgacgggaaagtttgcgcttccggaggaggttgctgattctgtgttgttcctttgtcaggtatgtttcctccacttggtgggctatgtctcttgttctgacttttgcaataggattcgagcggcatgatcaatggtgcggatattagagttgatggtggctttacagttagataacttcatctatagttggatatctccttcatgtcgatatccaaatctatatatccgaaatggttggggcaagaaacgcttttttattagtagatatcgacatttcgttctttattgtacatgaacacccttgggatcatccaatccacctcgccttgcaaccatgcgcccgacgtaacctttcctctgctccttctaggaagtaccctgctctggtctcagaacaaaacttccctagctgcattgattttcccgagatcccacctctacggcaccatcttgtccatccaaaccgaccagtcccccaaaaggccgggtggataatctgcgcatactcctagtactcaggataccatcctgcatattcccagtcaataacaccagtgacattgttctgctcgtctacgagaatattgcgcggcgcaatatctgcatgcgtggataccgagctctctgaatggggtggcatatccagtagttgattctcgcaccgacttcctccgtggtagagataccgctcgtatattctcgcacgcaaatctgagtcgctcaaaagtggtcgagctggcacttgtagatcttccagcatcgggtcctgggataaagagccatccgcggcacactggtaaggtgtctcaaactctgtaggcgagcgatcgttcaaatctttgagatgagattccacagttgaaggcagattggctcttagcctcgttgaccaggctatcccatttctgctctagagttattccgggaatgatagccatcccaataactccttcggatggacgataattgggcttaaaatactcatttgcagccgtctgcccttcattggaactaaaatcggtgaaaagcactttggagatcaagtacatgtctgcctatttgtttattgagtacagtgattgtctggcaggcttagtggatccagagaccatcgacatggtgctatcatttcgccgttcttgatatatcagtgtccctcgtgaagattccgtggttcataaggaacctcagttgaagatttggtcatattaaaagtgtttccatgtttccagtggtcacattcacttgaatggcaatggtgaggtggtgggaatccgagaaacccatcttcctgcggttgtcacaatcacctgagcacatggatttccatcacacgctgatatttgagacatataacctgaaacttgagcgttgatcaatacatatctactagcactgtttctccggtcctctctaatattactcggttccgactaacttgaatttagatatttgcggatttattctagtaagttctagactatcgatataattctcgttgtataatgaagggcagtacaccaaactggaaattagcctagaacatttctttgtatcgcagacctacgacggtagccgatatccgatctccataactgtagatattgatctggaggtgttgttggtgtttcagggcaaaatcagtgacagaggcagtggagggagagggagatcatatgtatgagtcaactacatctatacatctactcacaagggatatatatccacatcatcgccgcatgtacaccccatgaaaatcccacccctacacccacacctacatagtttcctacgtaaagtgtccactctcccaaatccagttcctagatattttcgcttcccatcaaaactcctaaagccatgctaacccgtgatatcgtaaagaagattgctttcggttccgccggcatggttgtctatgcgctgataccggggaaacactcggggagacccttgttgtgcttattggaggcatgctcgaggagactatagccgcggatatatgttagcaaggactcgatatgcagatagagcaacagaaacaaaaggattcgcaggggatagggatgtggaataacgtacgcaggcgccttggtggtctggaggaaagtctgtctgcagacctggcactggatgttcatggccttctcgttctagataagaatgtgggtcagtgactggggacaatatgaacgttgggaatgacgtttacgtacgctcttagtctgcgacttggcggtcttggtgtccttcgcgttgcgctcgcgcttcatgtttgccttagctccctatccagtattgttagttcactgcgtgttgatgggcctaaacaaagagctcagaatggcctggtgtcatctgtatgacttggggatgccttcttacattgcccatgtttgcgatattcgacttgacgtctgaaacgagagaaatgagttcgaaaaggggaatgcgataggatgtgggtgtgaggaagatctgtaattttttgtaaaaaaaattgtaagtcccggtcttaggccccacgtggggaacaaatgcttactaatcagatctatacggggccgtagcctggaccggtcgttggcaggcgaaggaaccaataaatttcaacttcatagtagaacagatggctgtgatgactgcgttagatatcttggcaatgtccatgattatcctctatgctcagcaatttggtactacaatacttatacgtctagttatttggaatgtataaaatatcaatgtcatttcatttattcgagtcgcaaacagcttggactcttggtactatccgctactaatacctacacatgtaggtagagaacctgatccgggcggcaatcattaccaatagtggaacggtatgcggtaaagcatcatggtgataaggaccgtgccaattagcaaccgtgcaaggaagagtgcgtagagctcttccatctgactggaagctgccccttcggatgggggcgcttttccgtctgtgctctgtcccgatccagctgtgccagcctggctgagaagtgtcttgcaacttccggaaggatccttggcagactgaactgatgctgcccccttgaaatcgcacgccgactgagccttcttctggccttcgtagtagcggtcaaagacatatgagagttgatccttgctggtacagatgctgtacgccccgtaccttcctgtggttgcgttctcggaaattccatcgcaggcggtcttgtcgcttccgcacactgtaccaaacaactcgccgtactgatcccccttcacagattgactgaccacgcacgagagactgtccaccatgcatgaacacaagtctttgttcggcgaaggtggtaggggactggactttgccagccacatgtcattgacggtgggacaggcgtgcggggaattggtgggggtgtaactaccgctgttaatgccgctaggggtcgcagtctgaattgccttcgagtaatggtcgaagtctgactgagtgctgacagatttgccgtcaacagagacgagcccatagtcgttggtactttcaaagtacatgtaaacgatgccaccactccagacatttgccatgtcgggaccgaagattgcagatatgtcgccaaacttgcgaggcctgatagtattgcatccatattcagagaagaatatagggatggggtaatccttgtactgctctgtgaggtttttgtaaccagagccctggaacgtgttgtctccacaccattcgtacatgttgtatccgaaaaagtcaattgaggtagactgatctccacagttgagatagtctgacagcgcattgcggaaatccggttggtcggtagttgcatagccaaagctcaaagactttctgtatcccttctgtttgacgtaggctttcatgtcgcgcaccgcggctttgacgaatgctgcaccaatggtctcattgacttcgttcacaacctcgttcccagcaaagaatccaatcacattgtcatattgatgcatcgcatcaatcacagcaacatatcgatcgtattgttcaacggtccaagtgggcgagttggatacaatcgacagccgaggggatgagagatcggcgataacataaattcctgcgtcggctaatttctgcatgcaagcatcgtggttcttggtcggatcgacagcgtagacgcggatgacgttggtccgcaattgctggaggtaggggatatcacgttcgcaacgagaaacatccgccaggggatcagtgtagtgagtgttgttagattgaccggtacctccggctcctccagcattgtagtcctctgaatgatagtcagtttcaagtcatgtaagagttggaagggtttcattgtctagtatccataccctggtaggcaatgccacggatgtaactagtcgcaaaattagtaactgaagcagtttcaaatagtttatcaactcacaattgcgtgccattgttggcataaaagaacttggaaccctgtggggtgacctcgttagttgcttgaatgccccgaacagtgaagaattacttgctttgatctcaatttgtgggacactggcgatggcaacagccaatagcaggaagattcctgctagaacagaatgaatttgcatcttaactgtattcaagtcagtcgtgatgattgctaggatagatatgagatgaataccaagctgttgagatgaaagccaggaggtttctatgtaacagctgcacgcgttgtttatggaagaaggaaaaggaaagtagaaggaggagagaaacaaatatccacgggtaccacgtgccacctggtcaggtccgactgcctacataaaaatacgaaagtgcccaggtgggaagcgacgagggggtatctgaccgcctcatattctgctcacttttcagtagcttggagagatatcggtaatttgaatggctgggagtatatatgcgtgtattagattgatttcaattatgaataacaccatcgaaacggtaggtaatcaacagaggatttgtacgtcctatcccgagcatagttctccacggtatattcccttcatcagtactagaatcggtgctggaaagtcccaaaccttcgactacaacaacagaataaggctcgcatctgctcgttctagtagcccagagtgtgtcttcgggtacttgcagtggataatctttcatagttggtctgtttatacctaggtacatgccttgcgtttgtatcgatatcctcctcttggcagagtcaagcctttttaatgtccaagtggagtatgtatgtcgcacgtacatacatacatgcggctccactagtcagtaaagcgatctgcacccgaggtcggcaagatccgacattgtcgctgacccacagctatttttatcgattcatctagggtagagttttgtcacgtgcaccttcggtcatcaaaggcaaaatccgacaaaatccgaactactgctgagcagacttgcctccattttacatctaatttataactgaagtgaactcatgtatcgattgttatagacacatcgtttctataattatctgtcaatgtatacgtgtcattattgctgttgtgatcgggcagcgtactaatcatccgcgggtctcttgaggttccaatcccattgtgtagtcagttcgaacgccacaggcgcttctattcctgtttgccttgaccacggggtgtgagttgtcgtgcagtgggcggctaaaaatccgaagcttggcaatgcaagggtgccaatacttatagtagtatggtcggtcttgtccattacacggtatacgggcgggaacctcaatgtagtctcccgggacattctgttgatggtggattgaaaatgataaacagaaaagtacatgctatactaaacaacataaaccgaaaattaaacgaaactcctgatggtagttacatagtatattccttgatctccgagtcccgaccatatcgctttggaattctagcgaaatatgacatcccaccaggggaagtgaaaaagaaggaaaacaagacaagcaaggcaacccgtcgcccttcgctcattaccgtgttcccaattaggccgaagcaggtgatggtgatgatgatgatgatgatgatgatccttgttgctgtcgctcttgttcttccttctgcttcttccgctcctttgcctgcacttgctcctttttccacaagccctcgtagtgatgcgtcacaagaggatctccttgatccgtagggtttttgttttgaagagcggcgaaagagactccaggcatgatcaaaacatcaccaaccagcttgggtcgtgtgatgtgtgcgtaatcgcgatcatcgacgggcctaccgagcaattgctcgagactctgcatgatcgcgatcgtcataatcttgggtcccgtcacgttgaccacgtccggaagcatttcccaggtgatcccttcgatgcccacggcattcgcccgagcaatgtctttcaattgattgatgacagtgtcaacgataacttgaagattgcgcgaattcttccgtccgacaaatacccagttgcagaactgggaagcaacttccgtacccggtcctcgccattcaaagtcgaattccaatccgacaatcatgtcgatgttctcatttcggtattccaggggtacccactcagagacttctttctcgcacgtggtgtctagaatctccccaaattccaccttcggcgagaacaaccaagtnnnnnnnnnnnnnnnnnnnnnnnnnnnnnnnnnnnnnnnnnnnnnnnnnnnnnnnnnnnnnnnnnnnnnnnnnnnnnnnnnnnnnnnnnnnnnnnnnnnnggcgagaacaaccaagtaacggaagagatcagcgcgtaggatcgcgattgacaaggcttcatatacttcgacgatatccggtcgggtcttaaaataatgagcgcggacaaatgcttcagtcgaccgatcggtcaacagttcttggcgcaaggaaggattcttgttcgtccagctgccggtccattcacgttgattttctgacaaattgtcagacttatgccagaccttgtctggaagtgtataaatgggtgcagcggaaggagtaggatgactgtcgctagctgaaggtttctccggaggtactgatattgataccgagggccccataccggttatccccgtctctggagactgcatgggactagagacaggggtggatgtttgtctccacgagtaaagataacaaatgagggcaaatgagattataaaggcgacggttaagcgcaaggagcgcgagtcctttaagttggttaacattggaacgatgaagagcctcaaagctgacacgaggggagaacgtgtggatacatgggaactcgaacaagaacatttgaaatcagcaaaaccctcagcagtcacctaaatttacattagcgtacggctgaacccacgggattttccgtaatttccgtcgcctgcgaaggccccttcgcacgtcgccccactaggtgattggagtggcgcagggatggatacatgatcatgcggatttggaggttcgtgcccttagtagcccattgccaaggcaatctaatgcaggagtcgagaagatcacgtcggctaacgggatacattgattgggccatgagccatcccaccaaattaggtcgcttagacgccccttattggtccggaggacgtagcttagcggagaaggtataacggtgaaatatcacactccctaccgacacctacttcgtgcctagtagcgtcgttcgtgtcaacttagtgggaaacagcataactagtatatatgatgcatattcgcatttacatggactacatcggggagctacaacatatgcagtcggttgtgaggggactttgtgcagattggctacaaactgtaacaataacaagatcacgtatggtcatggcgttatgggttcctagtgagttaccaatcaatgtcagcaaattcaaaccgatgaatgcaaatattgacttgggccctgttcctttccgtagtggcagcgctacgtgtgtcgctatgacaatatacccaacatcgtccttacgcaaaaccttcggcgtctaatatgttttgtgggtctcattggaaagcgaacacattatattgtgaattacaagcaacaacaactgggttaagtactgtgtccaatccaaggaacaggatctatagatcgaagatcccggctaataacaatcccaggctcctctccagcagctcctaccacagcagctcccacaatgctttctacggcagattgacaagccagtcaatcaccaacacctactgaggctttaacagcaagttccagccaagcttggattgcgggtcatcgcggttattgtagccctcatagtctggtggatctatcgacgaaagcaaaagcagcccccgttatcacaagaatagctctttatgagccacggtccgctgcagccatcacacccacccccgggatatccactacaacagcccatgggttatcccccacaacagccgactggttacccaccacaacagtccacgggatatccactggaaacatacaaacaaatgcatgaactgcccagtgtccggactccgcgtgtatatgagctaggctcgaatggctacaggtaggagacctgcgatggctgaagtggcgaggtatctgatgattacgaactccaccgtgatgctgaaatggccttgagattccattatatgttgatgacttgaatgtagtctcacgatgtgtcgagtggctggtgtacataccaacatgggaaagaagcgactttatacatattcaaggaccgagctttgaagctaataccacggcatctttatcggaggtttttttacatatttggttcacttcctgcccgcaaatacatttttctcttttctgttccatgtcacaaaagacttagaaacatcactatacataatgcaccacaagtatcatgtccgctcgcatgtattctccgcgtcaacatccacacagtgcgcagcaaacttactcgacttcctcagacgttccccatatatcctcaatacaggcgacaggaagcaaaacccagtagccagactagccaggacacacatggctttattcggacccagcccactaaacattcgcccagaaaacaacggaaatgaagccgccaacatacagcgcacaagacccagcgccgcaaatccactagccgagtacgaccgatagctgtccgacatatatccaaccagaacgataccaaactcgttgatcgcaaacccggtcaggaacagcggcaccacagacgcagaataatgcacatgcacagcgggagggatcgtccatgcaaaccaccacaacgcaatcattagcaccggtgcagcgataatgtacccggttagtttgtgctcggggataacgcgttcgccacgctggcgccggcgtgctgttttgcggtactccaggaagcgggtaccgaagtttggaaggaacccgaagccgagggccaggaaggggagactagcttgagtggctgtgaggccgaatgattgataaactccgggcaggatatccgtgaacaggtagatgagtccagtggagatgccgcacacgattgagactgctgcgacgatgggctctgtgaagaggagctggactggtcggaaggcgaactggcgcgcgaaagactggaggtctagaaccttgtctgggttcaatgcttggagagaatggtcgccagtaatgcgacgcaggtgtcgaacctcctgtgtcaggaggacagtcgggcgagattcacggatcgcgagtagcaatatggttaggattccggtgactatggcggccacatagaaaacccatttcctatagcgatctgttagttctttggtctttatctgtgtacagactgtcttcgagttggaacggtacttaccacccccaaaccgcagtgatgtatgcactcatcaccggccccactgcaatacccaaattcgccatggccatgtacggcagcgtaagccatatcatctccttagtgtcgaacatatcttgcatactgccattgatgacagcgctcgggaccgcggacaaaaagcctgtgatgaggcgccctatggcgcctgcagcaggtaactccgctgccgaaatcaacacgcagaatatactgtacaatgcagtgctgcccacatacagtttctttcgaccatagcattccgagtaaggaggcaatactatgctgccaatgccttgagcgagaagatatctttgtcccatctggtaagcatttcccgtaccatattcataccgacagagaaatacactcacgtcgagatgtatataaacacagacagggtctcgccaattccaaagtggtgctgtgcatttctggcagctgtggcctgcttacaagttagcatttaagataaatgcaatgtagatgcgatgccatatacccctgatgtgctcactgcagtcctaattcgcaagaatggttagactcatctatcatcaatacctgaacggggaaacccacgtataaaactccaagaagatgataatgctagcatcatacgcttttctcgaactgctccaattccgtggatgacgcgggttcatggcatcccaaccgacgagattcttctgatctccagtgcgcttcaaaccttggattttgagggcttggtttacctctagccgtggtttgggagccgggatgatcatgatggttactgagccaaggattgaggttaagcttaaatggaccgggacaggaaaggaaatttataggattgagcccaggcattcttcaattgagtttctctatgagcacataggtttcggaagtcctagaaacattagctgaacagcagggaaaacttgaatgattctggtagatcttatagatacatgcaagggatggtaataagaataagggtgctgaagtctttgacccaccgcgaggacgtaagctcataacccacataagagtaatagctatgttgatcttaccatcatcatataatctcccttgttgatcatatacattctctacgcttaagaatgccaattagccaccggggtttggcttgtcctttgcaggtggtttacgtgcgaccggacatttgcagaggggcatattagttatgcaattgaaggatctgcttatgaccatggctaagctttgtatgcaggatcattaagaccacgggtggctgtatacttacggcgatccatatttattgtttcaagtatacatatgcctggatactttcacttcatataattgtcgttcaaagtccaataaaaccagtgtcatattagtgttcatgatatatatcctaactatatcgtggttgacgttgacttctctagcgttgcacaatcgggacatttttaatgggcttaaccagcaagagcttgaactaataaatcaaataccctatcgaacagtgttttctttccccttttaggtgtttagtttcttttctatccctgttttcactagattcatcatcagacgatggtggacctaggacctaggaaatactagggattgcactgtttcagaagaggttaatcatcaacacgctcttttcaacccgaggctcctatattaagccaccagtataccactatcacaacaggtggcataaaatccaaatctcggcctcttgcttcaaggacttaaccgccgcctattacttgctgtattgagtacattcaagattctaccttagagcctttgtacggttaagatcaacagctgaatcaacgatgttggcatggtggtatataatcccagagtaccaagccccttctaatcaatgctttcacacttaaactgctctaacatacattcattggcagaaaacaaatactaacacaaaatattagaagagaacacgttttaggcaccctggatacaaattctatagattttcctcgaaatacccttactctagattccaattatttgcacacgtggagagagtgcgagatctacgggcgacgaagtatgccacgcaggaccttggtaatattggtcaatattgttaccgttttccctcctttcttcaattcacaaaatattctatactacaaagactgataacctggtttgatctataagtatttaggatttaacttagatggcggtatccccccgggacccggggctctggcaccccggcactcgacctcaacaatgaaatcggttgaatagtacgtagtcgatcgtgttcagctactagccaatctataggacaacgtccccgtgacacacctcatcgcccgttgggatatattactgggaccaccaggtacaagctgcaggtcaattcaatttggtcactggtgaaccaaagacgctggtgtgcattaaaaagaatttacactggtatttaagtatggggtcgcatcgtcaactcgactttgaatcgcttcgactctatcatatacgaaatctgttcccagatccctgacagtcttgttatatcccacacgcaagtttgctacacttaccgctgaatacgacttgcaatatgccgactgtaaacttactggaataccttgactcgcgaacccaggtggatattgacacatacagtgctgaaggttgtgggtcttttgacttgtgttaggctgaaaactaatgaaggtctcacatcagcttccaaagaaattggaccctttcaagatgcaacaggaaatcaagtattagaatatacctggaaggcctgttcgtctgtgctaattcgcactacagcttgaggtgcaagcggagattgtcaagcccagcagaagtgccgtgctgaaaagatcactagcgttggcagccacgatccatccacaatttgccaatcttaaccttgaggagcttgcggtggaggtggtggtaagtgtccagaaaatggagtgatgcggatatagaaagttgaccggtctaggcaattgaactagccctcgaagtgatccaaaatgtttacgggaatgtccatgttatgataaatccaagctatgcctacaatactcaggcgatagttgcaaatgcccaacgtaaaatgtaccccacaagtctacatcaagaagagagatgttaatttacgtaccccaggatcgcatcttatctgccaaatcgttgaccccgactttgacacatctcgcctggtcaccaagataccaacgacatgggagggaatgcaagctgcacgccagctcaagcaaagtggaataaagactttagccacgacgctcttctcaatggaacaggcggtccttgcgggcgaagccggctgtatatcgatttcaccgtttgtgcatgaactcaaaaccgagacttacaaggggtgagtgagagatatcggcgggtgttgggtgtatctctaattttttggcagatacaaggacagcaacccaatccttagtgtttgtgtgcaagcacaacagttctatcgccagaactctctgcccacacgggtaaaagcctgtgtgacactgagcatcgatgagctgattatgctcgccggggtcgacgcactgactatagcaccagcggttctgaaagaacttgcagctatagagaggccgcaagaggagttggatagtatgtccttgtttgcgataaacgccaaggccaccgaggctgtcagctatccttcgtatatcgattcggagagtcaataccgggttgaattcgctgccagtgagggtggaaaggcgcagtttaagacagcgcaggtaagaatacatttttagcttgtatcttttgcccaataaagactgactaatttctaatgcaggcaattgctctgttttgtgatgctcaaaccgcggtggagttgtacgtcaagtctcaattggaggactattcgtacacaccaatcactttataaagcaccatttgggcggtactgagagtgtaattcaaattatagagactcggtctgtcagtcttaagttgttgcttgttcgtttaattattttgcttcttttgcttcactgcggcatatgccgtcgtgcgaaacctcagagcatctagccaagaactcgagcttgacggattgaccttactgtgattatgactcagtgattgggcatgcttagaacaagatataagaattatactatattgtctaggactgatcatgactttcggacataaataaacgcacaaactatcattggcccacttcttgagataccttagatatgctcccatcttccctagccagtattattgaatgattagcgatccatagcaatgaagctcttgagggcctttttatagtcgtaacagcagtctataactagcgcaaggcttgtgttacagcgggttcgtaggtgcggcccgcgtttgacccacttcggacgctagcatgcattgggaaatgatttccacgaaggtaggtgcatgtatactgggtgaagagaacatgaaatttcaacatacatgtgtacctgggtatgtaatggctcgctctaatcaatactccaggtatctatctggatggtatcttcctgtctctatgagtattttcaaagttgaatgttcgtaaacataaattaccaggatccgaatgtcaataaacagcaggagcgacctcggggtgttccgaaatggaaggtgctttccccaaaatgcccttaaggagaggtttacgaacgcgtaaagttcatcttgtaaacatcccatgtccaaatgttcttatttgcatgtccgcgtctccgaaggggacatcgagctggatctccaggtggtttcacacaatcctaccaacatggtcaaatgcagaatgtggatggtgcgagggagcaagcccaaggtaaggcccaacccaatatttgatgtcaaggtcacctctggctaacttgggctaccgcaggcccctcaccaggaccaactacaactcctgttcgagatctgaggcggagatctacgagtatttcacgtcggctccggcatcgattctcgagagaatccaggcagtccggcgaacaccgccccatttttcccttcttgatcaagccaaagccaaatactcccaaaggaactacggggctatcaatggttggggacatgggaagcagtctaatgagcgaacgagggtacgacagtgatgcccagtatattgggagtcctcagcatgccgatcatttgagagcgtcacccggaagcccggcggttcgcagaatggggttgcatgatctaatagagcacagtcgtgagcggaatgacttggagatgtgggcgggttccgcaagccatgatcaacccgactccccgggaactccctttgggatgcactatatacccacaccaacaggaagtttgagggggcactcagcccatcccaactctgcaaccgagggcacaggtagccagtccgtgccttcattcaacaatgggcggtcgggcgatcaagacacgttcacgaaagctctcccaagtctccctcccagtcaagaagaatcagctccaccaagcctagatcgcctccgatctcgagaaggctttataggcagcagccgtgagaaccttcaaaatcttgtgcctaactggactcaatacgtgggatcaaatcccaacgatcgtcgcgcagcatcttcagcgtcgctagccagggaagatcggggcattatggtttcgaaaacacgacaaccaacaagctctcccaggacacactctgagacccgagtaccgcatctcggtgatctagacctttcccacagactcgcagggacaagcatggggtctgggccgccatcaactaacccatccatgttggaactgccacgtgcgaatagatatgggccacaaatgacatcacaagagaactttcaatctcatgagagatctagaacgtcagaaaatgtgggatcggagtcccagaagcaacctacgtctcatcaacgagacgcgtcctccttctattcgcgtcaaagcagtagcccttcacatggggcgtctgccgttcaatcactgagaatccacgctgcgaatgaaatggatagtctaccgaacatccatgcacgaatggcagctgagactggttcgatccaaagtgaacgggaaccaggtgccgaggttgtgaaaagcaaatttgttgagcaacttgatgcggcgaattgggggacaccccatgttcaagggacttccaatggcgccagcagtacctttccacatcgcagagtcagtcctggctggatgaccggggggcgacgaatgggctacgggtatagcttggtggaacatgctgacgatcacccaccaacaattggagggaacagcagtccatttccaaacggggattgtaacacgagccctaccaataccaacggggaacctattttgacaacaacgatgtgggccaaaatgaagagccaaccagtccgaggtaatcgtcacgcaccgctggtggtggatttggctggtgaaagaatgcctgcagaggaagccagccatggaagttcaattcgcccgcagcacattgagtcgcccacttctgcaaaatcaccgacttctgcaaaatcaccaacttctgcaaagacgcctacttctgcagccagcttctatatcgaagacgtggatgaaacgttcttaagtcgatgggcgaaggccagccgttccacacgtaaacaaccacaaccaaacaagtaccacgattcagcccatgggcgcactgtctcttctctgaatgattcaccacttggtgaacgccgctcctcggtggatcagacaaactatccgccctccgtgtacttcgatccgtcgaacgacaggagtgcagacagattgaatagagtgccttcccgctcacgtagtggacgttggttactaaagttctcgagaaacagggaaagcaagaaacgctcgaacctccctgcaaaagcagcatctcaggaagaaccacttcaggagtggccagtacagtacgaagagcgtccgtcgagtgacctaggccgagcagattctaccagaagcgatgcagcagaagagctcgcaagtgcgtatcaggactgcattgggatgcctggggccttttatggaagccggtgggcgagccgaacaagtctggtggtggaagcagagtgacgaagacgcacagcaacaatcatcgcagtagtaacaagggtacattggttgaacaagcacacgaatactgttatcggggtctctggggccaattctgctgttattattatcggcggggatggagttggtttaattatgagtatgcttctcagtcaggtgtcattaatcgtacagaatatgggtaattgatccctaatacatcttacacttcgcagtgcagttcatcaccagtaaagaagcaaatcatctatctcctctgccgcttgttgctcttgtcgcttgcgccactaagcacactagcggaccgcttgtggttaccatccccttgctgagcaccagccccctgtgtgttctgtggggcagtagaatgacccaaaacgccggcatcgccatcttcagtctctttcttcacatggggatgttcggggtcagcacttggccccgtgataccagcagcttctcgcagtttgcgttcgcgctccattttcgcggcttcgagtacacggatctcactttcaactttttcggacaccttgcgggcgtcgagaagcatattgacagactgaatgagtttctcgaaatctttgcatacacgctcagtaggcatgaacaggcgcacaggaatctcaagctcggatagagcattggccagtttctgggtttgcacgttggacttggcctgcgtaagtcgctgcgcacggtcgctgcggaattgcacgcctgcggagacacgctcgtgatgctggacgccgtactttgcttcctccgctggggtgagcgtgcgtaccatttgattggtttcctttgatgcaatagctcccttcttgtttgcgccctgtgacacgggggtctcggctcggcctaggccacctgcggtagttggagtctgaccggcaggacttgggattgcaccgtccccgaggatggagcggcgtttcttgctcttgtcggcttgcagtagagtctgcaagagctgggaaagacccgcgctggactgatacattgtggtgttgccgacgctgatgggaacctcgaggcgagagtagagctctcggcgttcggtgatgaagttctgctcgttgcttgtaatgcgcttcaattcttcgagtagcattgcctcctcgcggacctcatcggctgtccggttgagctggagagcggccagttctttacggtcgcgctctcggtcggggtcaaacttgagcatcttttcgtgtagatcgaactcggcctcagacatttctgagggtgggtgttctagtgagagcattgttgcagcaatgtaatagtatcgcgctttcatctgctccattgtccgatggtgtttcgcaggcacaagggcattcgcatccggctgtgtgtccattcgtggttggtagtcataacgatctgcgatcagcacccagcgaatgtcgtattccgtgacgagtcccaccagataatctgtttcctcgcgcgaccagtcatcactttgaagatgtcgattatactcgtcatctgtgtaccgacggggcaagcgcggtttgacgttgtacttggcgaaggcatattcctgctctggcagtttcggtacgtcctctttctcttcttgcttgggctgatccacttccatctgggattctgagggtgcaggtgcaggtgcgggaacaggtggtcgcgccgactcgtgttttctctgccagtggttcaaaaccaggccatccgaacgggcattgttcgtgaacggtgtcatgctcctacatagggtccaatatcagtatgcattcgggatctccaaatagccgcatcttgaacataccaaggtcgaacgcgcagcttgttcatccattttggacggcccttgtacttgttctcgttaatggcgattggtggcgccctttcgcccagtagcgcgtacaattcacgggtaataccctctgcaacggaaaactgtcagtaatctatgtcattcataatagagcgcattacacctacctggtcgcttttcgaccaccttctgcttcttgtgtggtctgggttgcccttctgcgggcaaatccagcatgtcgcgcacatcggccgcggccatattggcggttcgatcgggggagtgatctgtctagacacgccacgaagggggatttcttcggttttcgacgattaaagatttattaaacggccacagagagataaaagcagaatttgtttgatgaaataaagactagtgaatgtcgaaattgaagatcacatcgacagaggcttcccgctggaaagggaggcattccagagatggtaggcggtgaggtgccacggtccctgatgttgacaccttcacgaagagtagaacttggctgtacgactatccaattgcccatttcctcatcatggctttcactgggacatcctcgtcatggctggcgtcagcattgaccctcctctccttcttttctctcctcctcccaacgaatgccctgtacttctacatggagggccggcaaacaaagtgcttcttcgaggacctacctaaggatactctagtggccggtatgcgccagtctatagagccttcgcgaaggacatttaaactaatatattttgttaaaccataaataggccgtttcgagacggaagtcatcaacccccagagcggcagctacctgatcgaccataacttgaagatgctcatcaccgtcgacgagacctttgacaatgaccaccgcgtcgtgtccaagcggaacagccactctggtcgttttcacttctccgccgcggatgctggccagcacaaaatctgcttcacacctgagacggatgcctcgtcgggctggttgtccaactccccaggcgccgtcaaggtcaccgtcgaccttgccattggtgagaccagcaaaatcgagactgaggacaaggacaaaatcaaggatattgtgcagcgggtcaaggatctgaacagccggttgcaggatattcgtcgtgagcaggtgtaccagcgggtaaggattacccaatatccaatctatagctaatgtctctgtgcatggttgaagcggacatactaacgttttgtcttttttttttcttcaggaacgagagtctgagttccgtgaccagtctgagaccacaaactcgcgtgtcgtgcgctggactctaatccagctcgccgttttgtccgccgcatgcgcctggcagctctcccacctgcggtcattcttcatcaagcagaagttgacttagataccgcgttgtcttattccctatagcatttctcgtttcttatgccttgcatcttccttccactgctgtggtcacgcacgccggtttacgtgaatattgacgtttggtgcttacgtgcgttggtacactgtttctctggggaacagtgggtctttaaattttgatcggaggcatttcggcttccggaggtccctttgttaactcgttagccagtgtttcgacaaaaaagggtgcggagtgcttgagcatggtcagatgtcgatcttgataatggatgtaatgatatcttttcttctattctcttgtgtcttgtaggtcattgaaaccgaaatttgcccacgccaactacagtcactggggtcaacatcgtatattgcctacctaacccagagggcgatactctgaaaacgctggagagccatctaccctattggaagacttctatataccgtccttcttggctagcacttcaaccgggagcagaggctgctcccacctagtcggcttgtgatcaagtacactctctgctgcatgaaatagaatcctgaccctgctatgtaattatggtgaagacagcatctgtctcatagcttaaagttacaagagaatgtcgcttatcaccaatgattccctcatgcatctctgggaggatccccaggtacaatcttccagcgaactggaatctgtgaggctctggttccagttgtggattaggcacctctcctcggagaaggtctgggttgtgtcccaagagatacctcctgagggcagtggccgtcagctcgtggatattaccatcgaatatctgagtgaaggcaaggccttaaagtacttgctttccataaagtaaagccaccgaacacggggcctcaagatgttgaagaggtcgagggaaggcacttgatgcttgtatgaggtatcttggagagcaccccgccttgtaatatgtttatgcgtttatatcattcggaacgaaggttagaggagggcgatgtgctcgagatgaccatcatctattccctctattcggctccaaggcgttggctgaatgtactcagtatgtcgaggtacactcctcagaggctcagctgatcaaacaagctgtccaaatgatgagagctttaccgccaactctctgaatagagcttcggaagtgcactatgttatttgttccaagtggtataattcaatccattggatattattttctgcctgacatttatcgctgtgacaggagatcaatcatataattcctcacgtatggttattatatcatcaacagtcaggacgattcttcattttcggtgtcaactccgcaggtcctcggattttagatataaaatgtgttaactttgcaagatattccatatataacatgtaatgatcaaagcttctggattgaagtactggtgtaggttcagttataggctgctcagagtggaaagatgatcacggctaggagtcgagtctcagaatgtaaaatgctcattaaatgactctatatgtgcagcgatcgcttgtgatgtatcatcaatcattggatccaaatgggaataatagacataaagggtggcaataaaatgacaatgatggtatatggcagttgaaaatgaataggccgccgactcaatgcatgccctaacaggcccctgggccaaaggaaaaaaaaagcaacttggggaattgtacatggagaaaagatccacatccagtgggtatatatagtggtctggacatggaaatcaaagaaagcaacatcaggtttagacgatggggttgggattaccaccgcagaattcgagaatcaaccgttcgaggtcagagagtttgtatggcttcgtcatatagcctttgatacccactctggaggcgcgattcaatgcctcgtcgctaacatcggcactcacagcaagaactgtgggaggtggtggcgtacaaaaagagttgggaattggatccatttccatggagtcaggactgttggggttcggtcgctcaaaggcagcattttggttccgatgattgtcaaccatctggaggattcgtgaagtggcttcatatccgtccatttcaggcatccagaggtccatcaagacgacatcaatctgttttattcttgcagttgcagccagaggtggctggttgatgacgccttgcatcgcatgttctggatcgagaccaatatcaaggacattggaaggctttgacgcagagaggatgccttcaacgatctggaccgcttctttgccatcggccgcttcaagtacgtcgcggtagccaagtttgcgtagcatgttcaccaatacgcgccggttgattcgattgtcttcggcgaccagaaagcgcagtggatatttctctccaagcttcttgtcatatgcatcgctggagatacgcgttcgatggaaacgggtttgtgatgatggtcgcaaaggtgttgggctttgagacatgttttcgtcggtggcacacggtgtcggctgttgcagctgacagttttgggggaggataaatggggaattagaggaagaaggatcagacagaaggctactgacactgccctgtcgtgtttggtcggtggtacaggtagatggcgtcgaaacactctcgctgggagtggcagggcggagctcagtttcacgttggtttacggggattcgaattcgaaactcagtaccacgcgtaggaccggaagtcgacgaacgcacacatgtcaagtcaccgcccattttgcgagaaaggcccttggccacaagaagaccaagacctaggccatctttacttcttgtggtcgatgcgtcctcacgagcaaatggcttgaaaaggttgggtaggaatgcagcggggatccccgggccggtatcgcggacaagaataaggacatcattcctcttggggtcaatagttgcgcaaacagtgatggtaccgttgttggtaaatttaattgcattgagaaagacgcacgagattagtttggccagatcacggtcatcggcaagaagggtctcaggtaatgaagggtctacggaccagtccacaacctgggtgaacaattcaccgttcgaggaccgcgaccgaatctcaattctttcgccaaactcggttgcattgctaacagcagaatccggtcggccaccaacatgaagagactcgtttattaccaagcgcagaagatctcgcaacttggtaaaacgcaaagcagaacccctcaggttcacattgatgccctcgaggagtaagtgaggtgcggatcgtcgagctgcgagagacgggcgtggatcgaccatgttagccatcacagcctcaaactggcgaactgggatagcatgtacgatctggtcgctttcgtggacagcattcttgacttcttcgctgcggggcgaaagctcttgccgcgacgaagccgcacggagtctttgcttgcgtactggtcgggtattcatgtccggtggtaggctccgccgccgtttgtatggatttacagcgatattctttccttcaaaaaagatgctcgggcgggtttcgggtatagtagttgggactgcgagaccacccagtatatcgggctcctcccggagtggtgttttggggacttgcatgttgagctcgtatgcatgaacgacattgtcagcggcttcaacagcacgtctcgcgctatcttgaaccatctcaatcccctccttgagagattggaaaatcccgcccgatttgacaggagttttactctccatcgcctcgcgcactgtagcgtgcatgacatcaagcattcccaccacaccctgcatcggggttctcagctcatgggacaagcttcgggcgtagggtttgagggggtgggagttgaaatcagcggcttcatggaaggcggcagcctggggattgtgaaaatcaaaggtatttgtcgttggggaatctaacactgcatctagaacttgttcccctgggtctagtcgctgtacaatcaggtcttcgagcgagtggagaatcatttccaggaaggaccaggacaggtttctatgccgaagaccatctttggaccacatcaacccgagatgcgccaggcattttccagccgaaaaaaggggaatcgccaagtaaccatcagcggcgaatggtaaattatcatcgccgaacgatacaagtgagctgagattctcggggatcaaacaaggccgctcgtggtccatatgcaataaggggttcccgcccgcgaaatacctgtttcgctgcaaaccaactgtctgataaccatcgttgtagtagaaagccgcgccaaaaagcgacgggcgccgcccgcctagttctggcatcggctcactcccgtgcaccctccgagcaacaaacccatactgggctttggttatagatgtcatgtcctccataagccgtttccagaacagctcagtgtcggacgcccgcaaaccctgtttaagtgtgaccaaatgttcaatggcagtggtctgagcaccatcgttccacgtccccaagtcgcgttgaacatctccatcgtcatgaacggtgtgtatcccgtccccggtgatgcactctgacttgcaagagggaaatggcatggtgggacaaggttggacagcatgagagacatccggctcgggcgtgtcgggcatagtccatgtggcaagtgaaggtgaggtcggttcgaggattcagttttcggggctcgtagttgtccgagggtaacgaccgtagcattcaatggtataaatattagatacggtggatggatcgagatgaattcgacgtacatccaccagtatatgaaataatgaagagaaaaggcccagaaggattcctagaaggaggggagaggggattttccgttcggggggccgggcggtctagacacggcctgaaacaagagttgtcaagagctcatagactctgtagctaataatatttctaacagaaaatgtttcaggcttctctgagatcctgtagtttccttttgatgcttctcctctttgtgtgttgtggtttttctcgaatcctgcgaaggcgcacggaggctgcgcggcgggatctgcgggatctagaccagaagagggccattaggtactaggtaccttgattacccgagcattatatatgtggataggggtaccaggtacttccccaatcatctatagaacagatctactcccatgtatactcaaaacattgtatactgcggagtactagtagtatacatcgtagggactctctatgcttcctctctcattttttttttattatttttatatctgaatgattaacattcttctatatacacatagcgacgttgactccttaaccgcaatataccaagcaaaacgacaccccgaatccttggcatctacctaggtactttccaaaatctcacgagcatagagtgttcttgttatctcaacgtgaaacacgttttcatcaacctcattccagtgggtcttcatatggaggttgcactcatagcattccttcgatcggccattcttcggacgagatgttgagaatgttgggagcatacatacatgcgggcagccaaaaaagcgctcaatcttcgggcaatcgtttgtttcttcattgtaagtaatttcccattggctccggactcgcaaatatgtctgctcatcttctaagatgtagatcttctggtcggcaaccacttcgggctgtattgtgactgagcaatgatgccattcgagccatccatgttcacatcctttcagcatttgagccattgctctgatattcagcggactgcagggacagacgttcacaaatccggggtacttgcaacgatgatctatcccggtactatattccccagcaaacaaaatttcgtgggtcaggtgtaacttgctgcatgaggaacagtagagtcttctaggtccttggagccgacagagaagttgacggcgtaaatctagctgccgttcccgaacggaacttttagctaggaccccgaatggaagccaacctatgccgaattgatatcttgggaaggcaaattcatcttgtgccaaaacgtgttgatagcgtctgtataaagacctgcagctgagcgcaaggtaaacctgagactgtatatcgagcaggttgattatctggtccattagttccagaggcaggtccgatatagaagtgttcagctctgttttcggaggcagatccggcataggaggctctgggtgttctgtttctgaaggcatgttggtataactcgaagtagaccaagagaatataattgagaactctggtgatagcgaggttcggcatgggcaatacttcttggcaaagcaagaagcaccgcaccttcccttctaaggaatcatggccggttcctatttaggcaatatcatgccgtcggacactcagctccatggatgtagtgaatgctaaaattgactcttaaggcttttttttccatatcttttttggtagtttttcactcagtctgcaagcaaacaagcctgcacaatcaggtatcaatgggatgatcaaacaacaatatgatattgatacaaacttccagatccacgagtctgagaactcaacaaagtcatagttacgccttcaccttctcattttctgtttcttcactctactcatataaactataatctctgatcagttttttctcttttctttttgcactcttgtcatcaagtctccacaccaacatgtctattatgggatattcagatctttgcttaggcacacaggtgaccttcaccactccctcgcctcagaagtgggttctcgaggagaagctcaccgaggattttcaaagaatgaccaaccgtgaacttgagatgggtggtggaccttccttcgccgtgttcaagtacctctgctacagtccgacagacagtagcaagaaggcatttatgagaatttactttcaaattcccaaccccggaacagagtcccagtccccccagcttcgacaacaacaggcagctccaccccgtgagcatttggagttacaagctttgaaggatcttagtgaacaacactgtactgtggtcccagctctcctcgcctataaagaagaaaagcaaggtcaggacggcgtggttccagacggctacataacatatattgtgtgggaaatggtcagcgggaagccacttgatacggatcagttctggaggcctgaatcggcgcagttacgcgaggccgtccgcacgaagttccgccatatctgggagtatatttgcagaatcccctttagcgtgttaagagtgaaactaacaaacctaagagaattgaagcatcatggatggcagccagggctccctcttttgcagaagattatctacgacgactcaaccggggatatgtatgtgatatacgatatacactattaactataaagcagaatataccaactatctttaggcatattgcaggtttccgggaccccgaccgcttcgatcccggcgaaaacttttccgacatgacctttgtcctctggcgtttaactaggccacccagaaagtccggttgggagaaagaccctaccaagtgggcctggtaatcatcatggatgttcttttccccaggtccaatgcgctgcggcaatgaattgaatatttgccgcaattacatgaatcgaagttgatatcattgatctttttcctttcgggtatttctttgatatcgaatgacgacccaagacttccaatttgttaactaagagtttgtccgcattatcgggtcaatttatctatataacctcatacgacttccatccttcgttgtccaacatctgcccaggtgtaccgtgaaaccgaggtattatccccaccgcaggcccgagcgcgactaagagcataactggaacagccatcctgcaatgtgcataagcacctatgaatacgatgacgctaccgtagaaaaggtacatcaacggagtacatggcaaccaactttgcctctccgatcattcttaatcacactccgatcttgacgcaatccacaactatgacctcagtcaccccatattgcatcgctgtttcggacaagaaactccagcagctccaccagaagctggagtacaccacattccctgacgagctcgaggcttcggggtgggatatgggagttcctctccatgagatcaagagacttatcgctgtgtggcgtgagcagtttgactggcgtgcgcaagagcagaagttgaatgagcaactcccgcaagtcaatgttcgagtaggagtgaaaggcttcggagaattgaatatacatgtcgtgcatcatcggagcggaaattcaaaagcaattccattgctttttattcacgggtgtatctagcccttgaaacttcaccggtgtctccatcgcacttgctgacttattgttcctataccagggcctggcagcttcctcgaagctaccaggatccttccgctactgactaagaacgatggggatggcccagtattcgatgttgtcgcaccttcattgcccaatttcggattctcggaaggcgtcaagaaggcatgttgatatgtatcatcactgatcaaatgcatcctaacgaccaaaatagagaggattcgggctggcacaatacgccgaagctctacataaagtgatgatcgcactaggctacgaggaatacggcaagcactatccgaactcatgaaaagagcccgactaactctagagcagtgcttcaaggaggcgactggggcagcatgatcgcccgtactatgtctcagtattaccctcaaagcacccaagccattcacttgaacttcacgcccgtcataccaccctacccctggcggagtccctaccaattcctcaaatcgctggtatctgtgccattctcagcgaaagaccgtggctacatcgcccggacaatgggatatatcacccgcggcaacggatacttaagacagcaagaaacccgaccacagaccctaggctatgggcttcacgatagtcccgtcggattactagcttggatctatgacaaaatgcacacgtggtccgacaagtacccctggacggatgaggagatcttgacctgggtgagtgtatactacttctccacagctgggccgacggcgtcaacgaggatctactacgaggcctcggcaccgaagagtagtggaaatgcggctgtgtcggaggatggagctcagaatgatctgctggaaagaacggacgtgaattatatgtcgatggaacaagttttcggggcgcgggcaccacagaatgtccgctttgcggtggcgcagttccgggaggagattattatgtggcctatggcgtggtatcggtccattgggaatgttgtacaggaaacggagtatgatcgtggtggccattttgcagcctgggaagtacctgaattgctggcatctgacatcaagagattcgtaggcaatgatggaccagcctacggggcggtagccgacagagatggttattgaaggtctcactggatagccgcttgattgagtcaattgggggataacctacccaggtggcatgtggcctgcatagcaacatgtgcttctttcccgtttttatattcaatattgtcttttacccatatgtttgcttgcctctctagtctgacctacttgccctcttttgagaggattgtgttcattctgatatccgagcgacgtcatggaacaacaaagcagacctggtcaaaaggccacttgagaagttggacacttgggtaagaaaacattgtataagagcaccattattggacagactaatccaaaggtattgcccggggaacaggcatctagctccccctaaaggccttctggacacaggcaactagcatgttacgaggcctgaacaaagacagaggtcagtcaaagctgctcaacagaatgggatggttactgatgctcgaaagctggacttcatccgtttcactggttaatgcgttggattgataatgcaaattggaacactgccgtgacgtgacaacggggccttttattatcgtgatagaagtaagagaaacatggagtcaaagaacaaattgcccttcggctcaggtatcaaccgctctcacgttgctcttgtgctatcccgtcattgattgaccgtacacggcatatatcatccagtgaagaccgcagacgccgggatttgccctcaaaccaacggaaagcccaaaacaaccacttccccaaatctaatcctgtcgtcccttcaataaccgctgggtaaccttgtccttctctataatgtaaacctgggcaccccatccggagagagcatctcggtccacagcgctaagcagtgcttgtgagattgtctcgaagaggtcctcgggggcctatgatgacaaggtgtgttagaaaacgtatccggtagaaggtaagatagcaccattaatacataccagatcaggctcccacagaccctcgcaagtaccgaagagctggtcacttgctgttccgctgacaatgaagtccttggcgaaatcgatacagccaatgctgtcaaagccgcagatgaacggcttccccgttgttgggttgataccagctatcacagggctgacaaagtaaggaccgaagcgcttctcatacagcgatgagctcactaggttggcaagggtctgcggtgcgatatcgcgctcctcgcgcagccggtacatgttgaccttgtaacggaagagatcggagacggtgttgacatcggtggcgaggccagtcaggccgaggtaggtggatggagcgtagttgaagatcttggggaagttgttagagatggtaagggactgcatgcccaggcgaaggtcacaggcgatggcgacgcagtccttgcccaccatggcgacacaggcaccgccatctgcagaacgattagcatttcggttggttattcatgagggacaaagttccggcatactgatgtcgaaggggttggactgtgatgggagaagtcggtcagctttgaggtccagatattcgtggacgatagggacaagggcgcatttttcttaccattattgcagtgattcaatacaattcaatatagcgaagagattccagagctaaaaagaagaaaaaagaggagaaaatgtggttgagaaggggtcgggttggggggaggtgatggaggtgagttgatgacggggaagctctgaggtacgcgagagctcagatgacgcccgcaccgctgcctgtttcgtatgcgaccttcgactactttctgcgcctctttctccccgcattcaagatttacacttctttacttcaatttgtccatttcaaatctctttattgagatactgaactttctctatttattgttagagctactgttctccatacacaatgagcgcccacgttgtggtgatcgacgcgacagccaggcgggcaacaatcaagactacgcccgccaaacacttgaccgatatcctacaggaggcatgttcaaaacttggatataatgctagccagtactcattaaagtaagttagtcttctctactctccaacgacaacactgacccggtctattctatgcaacagacacaatcgcaagcagctagatctttctctttcctatcgtttgtctggtctcagctctggcgcaaagcttgaacttgttcaaatctctcgctctccatcggtcgtaaccgttggcctgcaactgcccgaatctgaggctcgcggtgccccgaatggccgcatacttgataagttccccagtacaactacactctggatggtactacggaagtttgaggcgggagtcgcagggactggtccggcacggaatctcacttcacgggcagtgccctctgcggacggtggagatgtcgccggacgattgtactatgagatccccgtccttcagattttggagcgtgaagtatcgagtttcacagatctacaaaaaactttaacccagctaggtttcaacagtggcaatgttcttattcgactcagtttccgacggaccgaagagcctatcgaagaagccatggccaagattggcgagttcttcaagtcttcagaggatgaggctccttcagtgcaggataagaacacagcgccatccgcagcgccggcagcagctcccattgacagcacaagcaaggaccctgttcaagagccctccagctcattgcagcctcagccctccagcgtcaccgccgcatctgatgttgcccctcccccacccatctccgaaccggctacttccacagtagactctggccgaacgattactgtcttttcccctccctcagaagacactccttcgtcggcgaaattagactacaatgagagtgattacatacccaccatcgagcacgcaaaactgcaccagcggttactcaacgagtcctctcgcccaaagcgcctgccaacggacgccgagatcgccgccaaggaagaggcagaagcggcaaggcgagcagcaattcgcgaagtcaatgtgaaggttcgcttcccagatcagagccaagtcgtcgccaagtttgggacgtcggacacaggactgtcgttgtatgaattcgcacgagggtgtcttgcgccaccattcgccagcgagaacttccttctcactgtccacggtgtatcccgatccaaacatacgaacgccatacccccatcagacaaaaagcgtctgattaaagatctagggctggctggccgtgtgctcgtcaacttctcttgggctgacaacgctgcctcctttgttcatggacgccgagcggagatcctacgccccgagcttcggagccaggctcaacagctcaaggtggagcaaccgccggagctcagggaagaagatgtgcctggcccgtctcggcctggtccaagtagcgctcagggcggtgataagcccagcggggcacgaaagagtggcggtatgcctaagtggctgaagctaccgggtaagaaatgaaatcgagataatggaatgtatttggttcaggtgagcgacatgtgctgctcttgatgatcatgacttgactatgtggcgtatctttggagacgcatcaaaatcttatgtgcagatagacttgaatcacatgcccttcgaatatcatttgcatggctacctcaatgacaatgtaacgacctacctaggtagactagacaccaaatgcatggtgcatatgcaatgccattgggacattgttgactctgcacacatatacctgacgtcaagcctcactcagctatacttaggcaatcatacgcttttccatctactttgtaaacctccatttagaaagtggctcaattgcaaatatcacacgtgaaatggttgaataattgttttcattatggtttcactccatacgatagagaaggaatcccatatttgccttcccctccatgcacgcccaatggccacgaaaccccctttccgatccgagaatcacgctttttttgcgtcgagtcgttaaaacgaaagaaaaacaggaacgggtcggaaaatttagtgagcagcaccggtgcggcgagactcagcaataaccttctgcatggactcaaccttggccttgccgcggccgaaagtaccgagctggatatgaagttagtaaaaggctaaactcaatggatcgactgggcgggctctgatccttgtggaaatcgtttgattttggtcataaatctcggtcgctggtgtacagaacagtaattgcacggacttgtcaaagcagagattgaaatgaatcttcctctgcaggatcgacgcacatggcccatacagtacgactctggtacaccaagacctcaaccaaaccgacccaaatccaacgcaatccatgcaacagagccaaccagacgaaaacggggaaaaggttgagagtagacgtacgcgcttcttagcgagcttacgggcacgcttgtcctgggcgttgcgcagcaactcaatgatgcggcgctcgtagggagcgagaccaacgacctcctgggcgatttcgcggacgaaagcggtacggcgggaagacttgcccttggtgcgggagatgcgggtcttgggggtgttgagggcggtggttttctatgtcagaaaacagtcagcatgtctgtttcgccaagtctcctgtagtggccgcaggtcccagtgttctcttcaattcgcgtttcgtgtctgttgtcggggtagttcatggtgttgtccgatcatgggtgtaaggcgagtactggcttcggtgccaaagttgaatccaaaaaaacaagtgttcccgtgacatcgaaatcttcccagcgagtctgatattttccaatgggcgattcgatcccaatcctccttgccgtgataattcccagtgtttccgcgatagccctggacccgactggtcttgagtggaccaacagaccgaacgaaaaagaagagacattgagagaccttcaaacgaccgaaaaacatggtgcaaagagacagtaagaacgtacccggcccgcgttgagtccgaccacaattccggagcgttcggccatctcgacggttgttgactgaaggggttggcggaggttgtcgaagaggaggtgagggagccgtgtgaaaatcgcctggtcttttgcctggaaccgcaaaatggagccttggcgttggtgcggtaggcgagtgactagggctagggctgtattaatcgggactagcgtatatttctaacacctcaggcacttacatcaatatatcttggcatacgcacgtgatagagacttgccctctttttatagatcctcctcttactacctaaactgcatttgactcgttaacagcaactctgtgatggatttggtttacatgtactctaactatgtattttcatggacacatgattcgttccttgcatttcccgacactcaggaattaaagcctggcagccagtactccatcaaatgcctcctcccagctctccctcagctctccgcaaaacaattcgagcgcagattcgtccatcaccttctctaacacgtcttggagaggtttctcgtattcatcggttgcatcgccacacttgaccatgtcgatgagtgtactgagagtcgctgattcgacaaggctctgtttcaaacttcgcgtgttcgaacggacatcctcgaaaacctcacggacaagagtattcagtcgctcaatttgttcggcagggagtttggcagtcttcaatgcctttcgagaatccaggtcgaaaatattccatagagccttgagggtctccaccagggtccagatggcatggaaatattcccatgtcggcgcacccggtgtaccttgggtgaacttgatcgtcgttctcatgataagagaagtcttcttggtgtctcctagagctaggtcttctctcttagccttcaaccaattctctacttcaccaagagcagtctcaatttcggtagaagtatgggccttggatccagccataaacatagccactttcagtaattcgacgtggatcttggttgcatccctctcggcgtcagtatgatcatctccagtctgggagagcgacaatttgtcgatttggggcagctctagcttcaaaacgactggcttctgactgccgatgctctcaagaacactgaaaagccgatcagtgagccgggcggatgccagccagttttcctatattgacgttagtcggtgccgtggtgtcactcaaccaaaccaaacttaccccaggaattgggcctgcgcgcaatcggtgctcgaatggagatcgatcacaacgttccaggttcatgaaaccatcatacttccggcggtcttgagccggtgatgtatcctggactatatggtagttagtattcaagtatgccaggagtacatgagagactgagaattgctgaccgatgtcttcgtggaggaccaagtgatttcctttgcgaattctttgtatccgccgtaaatccagggcccacattctccggcagatactgtccccgatacgtctgcgaagctcgattgtgtcgtctagaccgacataatttccatcatcgagtccttttatcaacgagtttttgatagtgacgtttgcattacgataaaagtcgagagcggcgataaatgcgacttgcgcgtcaaagtccttgtactctgcaccctcaataggaggcgcggggtgagggtggatggtggcaaagcgggtgaagaggttatgagcaacactctcatactgcatttgcttgacagacagcttgccaaaccacctcaaagcaatggaaccagcaccgagaagaaggtaaatgcgaatcaacataaggactgcctcatagttatggggtgaatcgattagaagacgttccagaataccggcggcgcgaatcagggcagtgttgttgactttctcggatgtctggccaactgggataggctgaagaagggccattgcggcaatgatgcagaagtcatctgtgggccgactttccatcgtggaagcagtatctggttggctttctttctttgggtcctgggtctttgctagaagggtgaatgcatcgtaaaagtaaaggcagttgcgcacaagagtctcgatgctggatttcgatgcgttcttgttgcctgaaattcggtcgcagtaatgcaacttgtacgcgttgatcaatggaatagcatcgtcctggaaagtggattagctcgcattgactgagtttagcagattttgcacttacgggtttcccctcaacactgtccatgcaatgttgagctactcggtgaatcaaagcatcatcacgggtctccaagacccctcgcaagtctttgaaagcatagagtttgtgcttgtgttggtcaaagtatctttggcacacaacaaacagatcatcctcggtccgctcgccccgtttgaacccggttaggactgtgtccatgagggcgatgtgcgcattgcgggacttcgggataaattccatgaacttctcaatatgctgctgtgtgtcggaaagcagcctaccaagcaagcaatcatttgttagctgaaattcaatgctgtggaagtagaatattggaatacataccccggaactttgtcaagatgacgcacagctacgatgagcaagttccagtatttccaatcatcgcgctcatgcagagtgctgcgctctgcttcatcttcagatacggcaagcaggcttttggcgtatgagtgcccttcttcccagagttcggcaagccccaaggcactgattttgtataggatgaaggtcctgtcattattaacaatccgagagctgagaccaacattctcgctattaaggagctgcacaatctctgcgaaatgaccctgcgtttcgagaattcgaataaccaagagaagttcctcggcggtttgtatggctctcggagggcttaataattcggtctgtagtaagccatttgaataaggcccagtcagtcattacgtccaaaccgtatatccagtgagcatgtagtaagtaatcacataccgggttagaggggacctcggatactgccttttgagcaaagcgataggcaagtgtgccaaacaatttgcggtccacgtccgaactagccgcgtcatctgaaacgagataacaaaggaaaatggcccagaaatagtactttcgctccctaggaaagttcttttgaagactcatggcagcctttggtaggaataaagacactcgttagcaatttagaccttgatacgatgccggcgtagcatcggcatcttcccaactcaccttctgggctgacttccagtcaccagcgtcatatccaaacttgaaccatctcatctgaagagcatgatcttgtggctttgccttagctgcccgttcccatatggcgctccgaagctcggtatggtcatccatattccgcagcgtacggtggagtatgtcgagagagtccaagtccgagattggcggatcgacgttgcacagctcgagggtctccgcaatacccttctttttatgagcttcgtccgcatggttgaagaggacattcgctttccaggcctgtttgcttgttagttggtctcttacaggtgccagcgtcgcaggagtgttaggttcggaatgaacaattatggggatcactcgccttcaaaaactgagtattctcgcctttcttcatgcgcttctcaatcagctgcaaggcctgcttcatgttctgggagtcaatggcatcttggatttggttgttgcgacgcagaaacaccgcgtcattgctggagctcatggtgaaggtgttgttcaatttgtggggaaactcttccaattgtcgtcttttgcagagtggtccgatcactgtgccgagcacagcatgggctaaaagagtcaatgatctgagttggagtcgagtgatcgactctggtcacttttttatttggcggggaatgagacacaaacggtaggcggtcagttggtccccgcaccatactgccgaagtatgagtttgggctttcatagcttcaaactttcttgtttagttagtatagattacacatatgtatgaattaagataagaagtcacactccagacctatggataatccattttaaaatcttgagacatggttccccaaggttgttgggggtttcagaggctacctacttccgtccttaagaaggttctgacatagatgtagttacatgtagttttagctttgatctggttatctctcgtatgtgtacaaggattgtattcgaattaacatggaggtccgcctggacaagatagtcaagaccaaggccacgagaattttaatatacagacttaaaatgattcaaaataaagtccaatacgccatataaaaacaaagttgcttatcttcgctggtcagcagcggaccgtgagactgttcgacttgccaaaaaaggtatatttttaccagcagagcaagatcacaaccccgacagcagtttggatatctaccatgtagcggttcacatgataaacaccggagcttgacctttggaagacttctaattattaggttggtagaaaagcacatcgtacacattggcatgcaacaactgctttgggaatgtcagggatcttgccggccagtaaacctgtcgacctttatggtccgagatgatagatatgtctcatttgggctgaggcgtcaaagaaactttcttctgagtgagctgtgcctggttagtgaccgaatatactttaacgtgtccgaatcaaagtcgatggaatagatctcgcggatgggttaccaaacatgcacgaggcatgacctcgatacggagctctgtattcaacttacccagttctttttgcaatcgcgataggctctagtcaaagtaatcagtcagtaagaaagctcaggcatatgataatcgtggtaatatagtacaagctggtcagaagtggatcgaaagccaggtacgccaaacggagagcaagtcgatcttttagatatatcacgtaagggttttcaacgtactggaaataatcgtggcacatttcgcggtcaaaggcattccgtttcatacacttgagactccgatctgcgaagtcttggcatggatcatagtactcgctagcatgtttactgaagtcgcaagttagctaccagtatggataaaggccacacgaattcagcccagtgaatatgcaaccgtcgggctagcccgtgtggttctcaagaccccatagtccatgtaaaggtgatccgcgaccacgaatgacttcagaaatgtcataacatgtttcgggaatagacacaagcagaaaaaaggtggagggaagaagcttgaaacatactgtgtgaacttcttctccgctttctcccacgctttgtcgtgagtgtctccttgtgtcgactccgctgccatggtgcagtgaggtggtatgtctccagtgtttgcaatggataattgaggcaagcaatctaatcaaataaaatagaacgccaaaccgtcgctcgaaaaccagattggaggaggttcattggagcagaagttagcgttgggcggaagaattggggatcaagcggtcttggcacagagatctgcgaatgtaccccaactggcgtcccgaggtccgcataccaccatgtttttgagtatgtacaataatatactgctctgggcttcatataattctagaagagagttctagatgagcatagctttaattatgagtgcgtctagcttgtggcccactgaaatagctgggcgtgctattttagagtgtagccttccagtctatctatatatatccatccacatgctccatacaattatgatccatataaatggcaatgagagtaagaattagtacatggattcttctctcaaccagcaaaaaagctttattatgacaaaatagtactacttggcttggaagatccgaaagatgctgactactgcgatgtttcgctattctctatgactgctttcactgctaggtactatctctcctccgatacaatgcgaatagatgcgagactactccacaaggccaaagccgagtcacaggaagatgaaacttctaccgtggactagcattgatagttattgcttcgtttccgtgactatgctgtccacttgtaatgacaggatcggtggtcagactgctctcagaaatgaaaatggcgaggtgatgaatgtgaaaagggccacaaatggtatgcatcctgaccgtcatataccagttccccaaactcgcaaagatagggttcggtcgtggtttgaaagatatatcgagcataaagcgcttcgggcactgggtataccaaagtagatcgcaacggtgacatatttgcgtcaattatcatccttgatggatgataatcttctcacaatggatccgtacggctgcgatagttggtgacttgtgtcatcaatttcgcggagtatcgctctgagatgcttctgggtcggttccgtaacgctaattggttcattggaactactagaaacgagcagggcatgtatttcatacggccagtctcaaggtgtcttccacgagcgggtatgttttctggagtatatggaaaggagattgttgaagatgacgaggttcagctgggcgtgttcgatgacagccaccttcgctcggagggactgaaatagcaatgacacgagaaacagcgaagccttcaaagttcttctattgtgctgtataggaactttgtgaatgcgttagagactgttagggatgtatgatcggtaagtgagtcggttgatgcaagatcaagatgtataagtgaggtcgaatatgctttgatcggctatattatcgaacagaatttgactcatctagtccaattaggaatcaaagaaaaggcgaagtcaaagacagggcagcatcttcgtgttttaagatctctacaggctttgttcatatgcgaaggtcgctcacctataagagatgtctacagttgcattatgcagattgaatccaactctaaaatatacgcgagaaatccgagataattgtcatataaagcccgtaaagaaaaagtgacgagtcacatccaaagttgctagttcagagctcccttgcccaggtgttgggccttcctcatgattatgttattgattgcctgaggccacaaaaacacctgccctctcacttaaagaatctggatcatattattactcttccttgtgcctttctttcaatctcagaccgtcacgttatcgtcgcagcgttcttcggcttcctagtgtttgtcgctgcgaaaagctgttgatcacaccttgccgccttgcgaaagttttactttccgggacgcccccaccgcatcctgtcgacactcgcgctcgccccgaaacgactcaaacacactccggtcgagtgggccaggctcctagggtggaaaacggagcatctgacgagccgcagaaagtcgaaatggcagctagaaatggttctggggccgaggcgtcgggagtaagtccattcccgtatctgatcgaagtgatcgagagctactgactgacgcgcactttacagctcgtgaacacactccaaggccatgtcgatgatattcgcactctgatacagtgtggtatatgcatccgtcccctttacgaaccgtttactatcgcctgtgggcacactttctgctactcagtgagtcccttctattttactacctcgttaattccattacctgaccagaattcttcacatagtgtctatcatcatggttcgctggtggaagatcaaaacgaacatgtcctgattgccgagcacccgtcaaaaatcaaccagcaccagcttatctggtgagttttaacaatcttcaattcgtttcattatatctgacatgtctctcgtgttacaggttcgggccgttgtgcagatgttcacgggtcgcgctgagcttttagataaaggggaaaccaccacagagcatacgaagaaccaaagggaagaagcagaaaaactggaccaggacaaggccaataatcatccaactgaaggaggtctgttcgggggccttttcaagcccaaagctcccccacttaaacctgtcattgacattgatgacggggtggttcggtgtccggtctgctcgtgggagcttgaaggagacaattgcgcaggatgcggatatcgataccgaccggagtctgaggagactgatgacagtgaatcagccgattatagtgagaccgacctagactcgctggatgatggtatggatgaggaagagggtgagaacgggggcgagggaggggaatctgaccacttcgacgacatcgaagacaatgatggcatttggggcaacttcgcgcttcagtattacgggcctactttcaatggacgctctcactggccaccaggtcgtgaccggcaggctttcgaccggttcgaaaacttgatacgtggacctcccatgatcccactgggggcgcagtccccagtggatcatgacaattatctcgcttcaggtaacaccaatggaagtgaatacgacgaagaggaagaggaagaagaagaggagaatgagtatgacgagtcagactcattcatcgatactgaaaacgaccacccgcccacgagttcgttcattgaaagtcaagccgatcgtctcgggagtggccatatgtatgaatcggaatcagaccgttccactggcaccgttgtggattatgttgcgcatgacagccttgccaacacgcatgggctccattacagaaacactacaccttactttgacgatgaggcttctgatgaagataatgaagtggaggaagaggaggaagaggaagtttcagaggcaccggacgatagaggtatggtcaatgaagactcggaagaatccgatgaagacgcagtccagactgcgccgcctcgtcaagccaatccacaatatccataccgatccccctggttccaagcccccagcgctgctccatggcttgcggccaggcctccacctgaaccaattcctgactcatccgaggaagaagaatcttcgccgcctattaggcctgctagatccagtgcgcgtcgtcacgtccatcacgggaccacggctctgaatgcgattcccctggatgattccgacgacgatcagcctgtcggtccagtgagaagaaccacacagaggcgacgtgccagattctctccatattaaaatcatcttccaaccgctaatgcggtatttgctttcgcattttatggcctacttttttcctctttttttgggcttcagcgcggcgcctgggtaatgctaagaggactgtggacatggttggcgttttgtcttgattttgatatcacaaggacgacctttttctcttttcctctctttttctgcagccttcaacggctggatcctatcttcatgtttagttttttttttaccggctcagccgtactctacgaatacccctacttacatatccttcttcggttcgatcttggtcttttgccgccctttgctagtgaagtcgaagaacctagtctcttggcactcaataaagcgtggccacaaattccgtcaaatccatgaaaaaagcctccgggttctaccgtattgagtccttgtttatcatattctgttctcccgccaaactagtagagagcacaccactgacttgcttcatagtgtaattgctaagattgcttgttatgtctgaatggtaactccatgcctgcgacagtctaccaagtcctttcagagttgacgaatgtatccgctactgactcacctggacaccctattcacaagcaaatcgaaccgatgagaacagccaggcaacatgcccacatgactcagacccggaatcataggaatctttggctattggttgttggtttggcgttgcgagattggagggaatcttctgatcgtttaccctaatcttgaagttctactgttcaggcacaatgctgattgaaagagggatatggttgaatatttcaatgcaccgaagacatccggcacatatgcaaaaatggtaaaatacacagatgtgactccaaatacacctgaccccgagcaacgctccccattttactcggccaatgaccaagatcgagacagaagattatgaacaaaatttatacatcagccttcacggtgtcattagtagcaaatggaacttcgaagacaacagcacaattgcggcctcccgaagtggggccttcatggaaattgttggtgaagcacttccagcgagccaatcggtgctccttgccgacagcagcgacgatggacaaaccacgaggttcgtgctcggtctcagactttttggattcagcaccaggcatatcagattcaggccgtcgttcgaacaccgcgatatcgttgatgacgcccttaatcaaaggctctggctctttttcatcagctgcaggggtggcatcaagagcaagagtctgtttgagttgctgcgaaggtgtgtctggtggtgtgacggtgccaggtaagcctgcaccgatgggacccagagcgataagtgtctttttatcttctgagacgcgccatgcgcggatgaaaccgtcccaactgccactaaggacaacgtcggtacctggtagagtggcgagtgcggtgatccagcgaggcatggggcgcatgtggcgcgcgttgtgggcggcagtcgcctcgtctacctcgggtgataacacatccagaggggggatggggtccaagccgtgagcaagacggacagtgtagagtggcttctttttgtgaactgaccaaagacagagggagccggagtcggagccagtgacaaagtgggtaggtggaaggggggcaatgcagtcgatgttgttttcgtggtaaggggcatttcttgaggcgccgccacggaacacgagctgtgtttcgtcgacgaccttccacaagcgagcggtgcgatcccgagcaccaacactgacacattcgtcaatagtcatggcggcaactccggtgacgtgatcctggtgtccgaagagtgtttcgacataggcgtgacccgctccgctgatggaccatgtcttaattgtgcggtcgtatgagccggagaacagctgctctccggaactcatcgctgagatatggcgtgcaaaagacaagctgcaaacagagtctctgtgctgcaagaaggtcttgcttggcgtcaaagtctctgcgtcccagatgataagcttattgtccgttccaccggtggccacaaattttccagacggcgagacagcaacagatatgatacttcctgtatgtccttgatcttcgtctgattcgccaactttgcgcataccacgagcggacttcacacgcttaggcttcttgcgctggggacgcggaggccgcttggaagtatcattatcgccgttcaattctgtagagcctggtacactgggtgtagccaattcccacttggtcaaagttttatccttggaaacaatgtagacgaatggcgggtggactgcaatggcagtgttcgactgggtatctgagcggaaaaaggaatggggcgccgtgggaatggatagtttcgcagcgatttgacggaacgtccgtcctttgaactcatcgacgtccttcttcaaccgttccgcaatcaagtctcggtcgatatctgcagcatcgaatccagcttcgtcgacttcttcttgaatgttacccaagtagcgttcagcgagtttcaatctccgatccgctgcggtttcgccatcttcggagtccgatccactctcgtcgcctgactctgccgtgtcgattgcggcatcttcatccaagtcactgcctgagatcgattcctctctgtccttggtccgtcgaccaccgtcggttttggcatctacgcctcgcttttttgatcctggggcggcggcgcggtcgtctctcttcctcttgcgctgggaattgggtacagtgaaaaaggacgacatggcgacgttttgtcaagcctgtcagttcttgatctctgtataaagaaatcgaatgtctggcgttctcgaaagactcggactgcggagatcaaaacttcaacttttttttggcagaaaaaaaagcgctaagcggcggctgactcagcaggtagctgacctcacgggagctccaggcctcaagctcaccgcgcggccatcctcacttaaccactactcccattcgtcttctctgatcatctacttacttgcttttttttattttctatctctcataccgcaaacatgtaagtccatgttgaccttgtctccacgaatggttactaatagtttgctagggaggttcttttgggtatcgccggcaaggacttcgtcattcttgctgcatccaaggccgcaatgagaggcccgacagttctcaaggctgaagatgataagacacgacagttgaacaagcacacagtgatggccttctccggcgagtctggagataccggtatgtagcttcctcgatgagacaaacacggcgctaatgagatacctatgctagtccaatttgccgaatacatccaagccaatgccgcactctacagtatgcgcaacgacactgagctcagtccctctgccgttgccaattttgtccggggagaattggcgcgcagcttgcggtcacggagtccctacacagtaaacctgctgctaggtggtatagatccggtcactgagaagcctcatctttattgggttgattatctagcgtctctcgcgcccctaccatatgctgcccatggctatgcccagtatgtttcatggcccgtgacgatggacgatacagcagtccaggcgagagagacctgatgctgactctgctagatactactgcctatcaatccttgacaaacaccatcatcccgactgctcccttgaggagggccttgcccttctcaccctgtgcacagacgagctgaagcgcagactacccattgactacaaaggggtaagttccttagggagccatcctcgactgccattattctgacacgattatccacagatgctggtgaaggttgtcacaaaggacggtgtgcgagaaatccccgtggataacgataaggtggtccggagtgcttgaaaggtcgacataccacggcgtttgttgtatcacatcttatgacgtttttctttgattccgagatagtccaacggtcggcatgattttggctgtagcaagcttggaaatcaagtaacgagtagattcctagatggccttcgataaacaataggcaaatacaaccctataagctcaccgctcgaaatgaacagcattttgtatagaacgtacaccgcttggcattggcctgatgggcgtttgacttgtttgcatctttgagtcgcatcccgagctcgcggaaagtcaagaactccaagaccaccaacttttcgatccaaaacatctcaccatgtcaaaaagacaggcagagctccccttggagcaagacttttccggttcacccgcatcgaaaaaggcgcgcgtcgaggacgacaatgatcccggttctatcaacggcgcagcgcccgcatcccaaaagaccggcgaagagattagacaggatgatcgcaatggcgtggatatcctaggagcagctgaaatagaaggagaggagcttgaggagggcgagaaagatccctctggactctcggatattgacgaagatgcacctgcactcagcgctccgaagcggcaaagtgctcccatggaaggctacggcgacctgtacctcgacacgatcaaccgtgaaatcctagatttcgatttcgagaaactgtgctccgtcagtctgtcaaacatcaatgtgtacgcatgtcttgtctgcggtaaatacttccagggtcgtggaccgaaatctcatgcgtattttcacgcccttgaagttggacaccacgtcttcatcaacattggcacgaagaaggtatatgttttgcctgaaggatatgaagtcaataacaagagtttggaggacatcaagtatgtcgttgatccacactatacaaaaaaccaagtggtcaagctcgataaggaagtgcatgatgcctgggacctttctgggtcgaggtacagaccaggtgagagcctataccatgataggatcgaatgttcttttttcgctaatagtcttccgttccagggtttgtcggcatgaacaacatcaaagccaacgactatgtcaatgtagtagctcaactactcgcacatgttttgccaattcgcaatttcttcctgctccacgaattccctactcccggcacaccagagataattcttcgtttcagcacgctggtgcgcaagctatggaaccccaaggcgttccggtcacatgtgtctccgcacgagttactacaggaggttgccgtacgatcctcgaaacggttcactctcacgaaccaggcagatcccgtggacttcctgtcttggttcctaaactctctgcacctcgccttaggaggatccaagaagccctcaccaacacccacaagtgttgttcacgcagcgtttcagggccgtgtacggatcgagagtcaagctatcacggctcactccgacacccaaaatgcccggttggtatttactgaatctggcacaattaatagccaggttactcctttcctcatcctcacactagatctaccccccacacccctcttccaatctgccaatcgggagtcgagtatcccacaggtccccttgactaccctcttgaacaaatataacggctatacggcgtcagagaaactggcccaccgtgtccgacaccgtctcctccaccctcttcctccctaccttttcttccatatcaagcgcttcagcaagaaccgctttgtttctgagcgaaacccaaccatcgtcaccttcccctctccgcacggcttggacatgtctccctatgtcgagccaaatcccaatatttgctcacccagcgagccaatcctctacgatctcgtggcaaacatcatcctcgaccccgccatcgctgcacccggtgcaatggatgacgctgtggacaagggcgtcaacgctgcgtcaggagctggcggttcctccagcggagcaggtggcggcagcgagaaggtgtcatggcttgtccaacttcatgataaagctatggaggccgagaacactcgcgccaaaaatggcggttccacggagaagcagcagcggggcccggagtggcttgagattcaggatttgttcgtcaagcgcgcggaaagcgagacgctgttcactcgtgagggatatcttatggtatgggagcggcgcaaagtgcctgggaacaaaggaaagggacgtgcatgatctgagatagttaaacctgagttgactggggcttcgaacttgctattgtcttccacgtttttgtttttgagagcaaatccaatgtaccatcagctaatgaaaatgtgtaaatgcaaatctcatcaagatagcaatatgtgctccaaaaggatcatattgtacaaagtccctcatagttgtagtggggagcatggtctgaaattttactcggtgaacctaggtctttgagacccccgcatgaatgaaaatggcggatgtaagaaggggaaacccaccctaccagaggagatagaggaaacagagcaagtacggtagagtgacctaggtattaaaacggctaaaagaaacgactactcatcacaaggttccccagccgcagaagttcctccctatcctcatcgtcgagcctactaggaacccccaaatccccgctctcatcgcaacttgcattcctctcatgagcacaagtcggtaggaataggcacatatgtctggccaggttctcccgccaaaccaaagacccaacgggtggacgtctgagagacgggtaacggaggaaggatgtgagataatccaggatcgggtcaaggagcgaaggtagagtgcttcgagcggcgcgagtattatgccgctgattacagcagcgagatgagacgcgagggagtccactgggtatgccgaaagaagggtgacgcggtggacttgcgacaatgtgtttgtcagttgtccaggaatcagagaagagggtagaattggctggacaagggtgtcggattgggtgtcctcgttatggtctgtgtctgcgacagggttcgattcattgggtggctcttcctcatttggctcttccacaccatctgggagaatgtttggtacggtggaccctagagtttcctcgattgactctaaagtcggagcgtcggtggcttgggtttctggggccggaatttgagggtttaattcaggggcacccaagtcttggggggttgtgtttgatggtctggcagtgatacttgagaggccatccgtatctgctgccgctaggggctgctgggcctggcgctgggcctgacttatgatcagagcctcgaggaactcggctatggatcgtctgtccatggcgtctggatttgaacctggcacaccatttcccgctagtgcatttaactgggcaggatttgaagtttggatattcgagtgacggttccgattgcccattaactcaagctgcattgtgataacgtcggggctctggtgaatcaaggatgctcttacgcgaggcgacgtagggggtgatgtttctggtgatgacggttgagaaaagagagtattagaacgcgaactctgtcggtccacagcaaggtcctcaccattttgcagaggggctgattggtcctgctgtgttgaactggcggagagacgactctcccgaccagcagtagctatctcggagaaatagtcattgctcatttccccgggtgactgagacatacggttttcgtttgtaagcacctgattcaacccaataacagattctgcctgggtcagacgcatggatggagttgtatcatgtggtcgtggtcgtactcgcgatgcaagagcggcagcctgggcatcgggagtaacccctggcggtctaggcacgggttcatttgggccttctccagcaccaaggttgacttgaaccccgccaagttcgttttgcaataactcaattgaatggcgtagattttcaatcctctcgtccctgaaggaccgaagaacttgctgctctgacaattggttcgatctcagtccaaaaagcgacgatacccatcttcgaaaaatggccagttcgaacttgatgtcttcgaatagcgtgagcttgccgcggtgtaattcttcgtccgatctgcggcccagggtgggcactacccactctatcaggttttcttcaaacgcaacgcggaccgagagttcgtcaggaagagctggtttgggaaggtgccgtctgatcaaccgatagatacgctcttcaagctctggtcgcaggtagtagccatagaggaacactaaagcaccaggggagatcaacaactccacgagtgacatccccagtgagcaaggggagaaatctgtaggccaagatggcagctgtagcaaagattctctgctgaagggaagcaaaaattgcacgccagggattccatatggagacacaagggaaagggactggagtgtagagtacatgtagaactccatagacaacatgagcacagaatttctcgccctttattcatagttagttgtcttgtctatgtgaatggaggaaggatatactcacgctgtatacagaagcccgaaaaaggaacgaacaccgagtgagtcgcccgtcaaagtctgaacatagtcacgcagagagacaaacacccgtttcagcggggtttcgcgagctatagccaaagcactggacattgcccaggcaggaattcccgaaaaatagaagctaaaaatccctgtggtgtctctctcagatttcatggcactgagcaatgtagagtgggcataacgccggtaagtctaaacatcaagtctcgaatgtcagcccaatcaaagtagtatcggcagtgcatttacctgtactcgaccggtgactgaagaggtccaccaggtaccgaaaaagatgaacagttgatcgagggttgttatgaccagtccgaagtcattttcactcgcaatctggttgatttcttgctgttcattgggcataccagaatttcggtctccattgacgacaatccccattgttgaaaggatgtcattctttgctctccggagtcctttcccgaggcttttggactcaggattaacagggtgccctcgagtatcatattgctgcatataattgtctgcatggacgttggatatccgtcggactggagtggaggggtcaaccgccgcattgtcaggagcttcgtatggggaccggcccttgagatcagtcaatatagtatactatgcaatttataactacgttcaattagacatgtatgggtagaggcgtctggggtggggcttgtatatcaggatggaaacaatcggacagggcccggtggtgactggttcggtttcagaagactttaggcttctcgaagtaaagcatgaaccattgtcacagcccgtagacccaagatttctcagctgcgaatataggggaagttcgcgagtagaaaggtgaagcttaccaaagcgagccggttcaaataagcctgtcgacccatagtgcgcgtgatcaccgggctagtagtgtagccacgtggccttttaaaacaccattagtacgaattctttcagaaagcggtatgaaacacgatcagacgaaagcccagcggttgaaggtgaacatgtggttatgcggctagacatggcctgaggcagaagccatatcttatcaccaaacaaacggtgcaaacacccaaaaaaagttgcccgctcgagctgccgtttttcgcgatcgttcaatctctacggctcttcgactggccaatggcgtgctaaattctacttttttacgccgagttattatagagtcatgtcgaaagctattgtcaaaaccactttcgaggcgtcccgtacgctccgccccatttacaccggtggtagcacggcgctggatgccagtgggcgcatcttgctgagctgcgtgggcgaggatgccttgatcgtcgatttggagactggtaaccagctcactagcttggaaggggtatgttttgtcgccttgatggtattcttcaattgcaaagcgctaaccacataaacgctgcaggatggagaaattgtcacaggtttggccagtgagtattgtatgtcctgggaatgaggataaagcactaacatttcgtctagtcacgccttccgcctcgcacgctattgtctgctcgcgctcgatgtccatgcgaatctacggcctctcaactttcgacgagacttctcagaccattgaagcaaaacttctccgaaccctcaagcctcacacagctcccgttgtgaccattgctgttgaccctactggcacactgcttgccactggtggtgctgatggctcaatcaaagtctgggacatcagaggtggctttgttactcacactttccatggtcatggtggtgtcatttctgcgctttgctttttcgaggtgcctactgccgacagcgatgccaagtcatccaagaagaacaagtctaagcaacaggctacggatgacgatgatgaagatatggagggctctgcccgtatgggttctactgcaggattccgcctagcatcaggcagtgaagatggcaaaatgcgtgtatgggatctgcacaagagaaagtccattgcgtcgcttgagtcacatgtttcacttgtccggagtttgtccttctctccatcagagaacgcattgatctcggccagccgagacaagactgtcatcgtctgggatgcgcgtacttggaagactcgcagaatcattcctgttttggagagcgtggaagctgcggctttcattgcggatagcggactatgcgttatcggcggagaaaatggcaaactgcgagtttgggactgcaatcgtggaagtgagatcacagaggaacaagaggccggagaggagttcgaaagcgtcgtcgctatccagtattcgcctggtttgccttttgtcctcacagtccatgcggatcagactctccgcctccactcgctcgagtcactgtctgatcataagccaggctcaaccttggagcctttggcgattatccgccgcatttccggcaatgatgacgagatcattgacctggcttacattgggcctgatcgatctatgcttgctttggccactaacaccgagagtattcgtgtagtttcggttgctccctcagaagatcgaccatcaaatcagggagaggagtactttggtgctgatgtcacacacctggaaggccatgacgatattatcatttgcattgatgccgattggtcaggacactggctagcaacaggcgctaaagacaacacagcccgtctttggcgtattgaccctaaaacatcgtcttatacttgctttgctattttcactggccacgccgaatctttgggagcaatcgcccttccccgtgtgccaccccctgttggcagtgccgcatataacgaccccttgaaccacccgccagcatttttaattactggctcgcaagatcgcacaatcaagcggtgggatacaagcaagctagcccccctgacgggagaaaaggcacactaccctaaggcaatctatactcgcaaggctcacgaaaaggatattaatgccattgatatcgattctacatctgaactgtttgcctcagcatcacaagatcgcactgtgaagatctgggccgctgacgaaggctcgacggtaggtgtcctccgtggccacaagcgaggtgtttggtcggtgcgattcgccccgcaaggcacaccgattatcaactcagactcacgcactagcacgagccgtggcctggccgtcacaggctcgggtgacaagaccgtcaaactgtggagtctgtctgactacagctgtctcttgacttttgagggacacaccaacagtgttctcaaagtcctctggctcccgcctccccaagtctcgaacaaccaaacggatgaggatgaggatgacgaagaggctgcaacagcacgcaaaaacgccatccaggaccgtccccttatcgcatccgccgccgcagacgggctggtcaagatctggtccccctacacaggcgagctagaaaccactctggacaaccacatcgaccgagtctgggcgcttgccagcccaaccccatccggctcacgcgcagacgtgaagccaacctcctccaagctcaacaccaccccctacgccattgcctccggttccgccgatgcaacagtgaccttctggactgataccacatcagccacctacacagccgctgtcaacgccagctctgctcgcgtcgaacaggaccaagagctgcagaactacatccgcgccggtgcctaccgcgaagccatcactctggccctgcaactcaaccacccgggtagactgctctcactcttcacctccgccatcgacgccgcagacgacccaaccctccctgccgaggaccgcgagcgtgctgcagccagtctgtccggtaacccgtccatcgacgaagtcctgcagaacttggaccctgctaatctgcgcaccctcctactccgtctccgggattggaacaccaacgcacgtacctcgcgcgtgtcacagcgtatcctgtatgctctgttccgctcttaccctgcgtctactttcgtggagcttgcgacccagtccgtccgcggaaaggagggtcgtgccgcggctggtatgaaggatatcctgcaggcgctggctgcgtacactgagaggcactaccgccgagttgaggagctggttgatgacagctacctggtggagtgggttctcggtgagatggatggtggtgttggacttggtggactgcgtgatttgactgtgggtgatgtcagtgacgaggaagaacatgagaaggacgttattatgttggaagcatagtttggctttagtcttttgccctgtttgtacattgaatttggggctttcgttcttggagtaccatgggtgggaaggataaaagccatctctttatagaattgaatagtgtatcatggaaagtatcctttggccaaagccatctacatgtattttgattgttcagggtatctctttttttggttctcatggtaaaataacgagatggagggaatatgtgagggaatatgcagacagaagcagcaatctgtcgtgtacaaaggcccgaatactcttcaaccctcctcgccaaaacatttgacctctaatcatcacgacgactccgacgagagtcgcgatcacgatcacggtctcggtcattccgagacgagtgccgtgagctgctgtatctctcatctcgagaccgatggctgcggtccctgtcccgctccctatctccatctctccttcgatcgtctctatcatcgtcacggtcgcgacgacgatcccggtcatagtctcgatcccgataggaccggtcgtcccgtctgcttctatcgtcatcgtcgtatctagaggaacgactagaagaatggcgaccactagaccgactgcggtcacgtcgcgaggacccagtcttccgacgagaacgttcctcctcgtcgtcgtagtcgcgtttgcggtattcccggtcacggtccttgtcccgaccgctcttctcaaggttgcgatcccgtcgctcgcgccagtcgtcttccttgggaggtttggacttggcctccttctgtaaagcagcgagttcctcttcggtaagatgctcgccggttttcttattccgcatcgtgataggcatgtacacaccctcagccttatcattttcctccccctgtttcctcgacgccttgcgcatagccgattttccccaagctccaagctcggcttcggctcccttgccgccggacgaatcctttgcgccaatgccaaggaggccaggtcgtcgttctgggacacgagggtttttcgccctctctgcagctgtggcactgctgtagttgcctcgtccgatagcttgaccatccttccaacccattcctcgtagcagggcggcgccgaattcctcaacgggaatagcgttgtaggcgtccaaattagcaggctcgggccgggatgccacatctgttcggaaagaccctaactcgctgtagtgaactggttcttcttcctttgtggcggactcgataacgaggtctgacctccgttccacgtctcccttggtttcgcgaatcagcgcttgcatggcaatctggtcgtcagtgaggggcttggtctcgacaggtttcgcatcaggcatggcctggtcttcgaccattgccgcgccgctatctcccttctctgcagattgctgcgcaaagctcaacccgtacgccatactgggcgtatctgtctctaccgtaggcactccggattgtgcttgtccgttcttttgcgcttcctgcatagcctgcacttcggcgggtagcaggttcttcttgcttttcttcacattgacgcccgcccggtcgcgccagttgttcttgctcgttacggggatgatcagtggcttatttgcgtcctccactgcctgtccatccgcagcaatggcggcacctgtgtgggtgtcgaacccagagatttcctcgtggaccggaggggcctcatcttcgtcggagtcatcggcgtaaccaagctggtgaggccgccgaggcagtgatcggccatttgctggggaatttgtgggacggccgcggtttgaggattggaggttgaaaccagtcttttttggaggaccattcgaaccggataaagatagagagttcggtttggacggcggttgcataccctcattatgatcgcgcgaagacatcgcgatgttatcttggtttgaaacaaatggagtgcttagtagggaagagagagctcgaggagcagttgatactcgagagctcgtgggcggtggcaaaattgaagcgcgcggctaaaccggcagattttgtatgttgttaaggcggtaagcaagtcggagatggataaatcatcataaaatacctcagtatgatatgtgccacgcaaatcacctttcctgcctcaatagacaaacaccaacacaaaggtccttgggttccactcattcgaagtaatcaaaggcgagtaggctatacttctacggagtaggcagccagataatccaggcagtgaagatcacaaagatgatctgggcctaatcgggattttgaaggtactcgtaattggattttccttttcatcgttaacatcacttctcggggattcaaatggagtaatgaactacatgcgagccagcaaaatggccgagagccggttacgtagtccggtcttgtatagtccatttgttccggaactgtttttagatatgtttctagatatccacggatctgttaggtagtagtagaatcttgaattctagtttttcatctctatctactattaggtggtagtattctaaaaatatgccgaccagacaagcataataagacgaaaagaagcataatccaagtggaccccgatgccccacagggcgtattcgttcaaaaactacccgattcggaatctagaaatagccctagagaactgcatcagatgtttataagtccctataaatcccacatcttcctcaggaagaaagaactacactcttcttggcatcaataatatggatattgtttttcaccccggcaaaaacgggactgatccctgggtagagttctacccctacacaccatctgccacggctgggtatgcctttatgggaatctttggggtttcaacccttgtccatatcgtgttgatgttccccttccgtgctgcctacttcatcccactggttctgggaggaatttgtaagaagatagtccccatccacaaaagaggaaacatcaacgctaacgatgaacgaccaggcgagacgttcggctactacggcagggcatggtcacaccagtctcgatttgacatcaagtcatggtccttacaggagatgctcattctatgtgcaccgcctcttgtggcagccaccgtctacatggtcctcggccgcattatccgctccttcggcgctgaacatctttcaagcatgcgccccaaatggctcacctttgtcttcgttatgaacgatgttctctgcttctgtacacaattgggaggtgcaggtgtccaggttaccggggacgagaaggtgatgaaaattggcaagaaggtcgttttggctggcttgatcttctccttggttgtctttgcctggtttattctgattgcggccaaatttcatcgacgtctccagcaaagtcccacacctcttctcaatcagaatcccgatctgccctggcagcgatacatgtgggcaatctacatttcttgcttggctttgatggtgcgcaatctggtgcggactattcagttcggagccggtcagaaaaccgatgtcaacaccaaggaggtctatatctatgtttttgacgcctttttaatgttctttacgatgttggtattgaccatttaccatccgggtcggcttattaagaaggctcgtcgcttgaccaagactgattttacgggagaacgaaattctgcgcatgggctgttgagtgaatgcgagatgggcgagcgcatgccgaacaagtgattgatgagggttgaacaagttatatagccagaatagagtccatggtaccttcctcatgtactaagccgtttagggaaaccttcttcctcccgaggtcttcttcttcttcttctcctggcatctctaccctcttctctcttcacaacactctccactagtctatctttcttgaacttctactttttactttctctctataatccctactgctcgaaattatccacacaaatacacacactttctctcacactcgctcactccatcgctttcaagactatccattctcccaacatgcctgtcaccctcaccacggccaaacatccaccccgtgggtggcgactccggaaggtagccgacatcgaagacctcttcagacaatcctgcccagaagggcgtcgtgatagtaagaggttgattgggaactcatttgctaaagacttcttcgacacatctcacgtctccgcatccgaaaatggctttgtctgggccgtgttccacgcctatagccatcaccacaaccttgtgctgcggcccgaagatgtatggttcaccattctatcacagctcagtttcttcgttatagcacattccgaggaactgcgacatctattcgtctcgcataaagatagaaaacacctaagtattatctcaaatgagaccttggacactgtggactttggtgaactggcattagaaatgaccgagcttatggaaaagcatgtggtggatccggaactgcggagttggatcatgccggccttcagcaccacgactgcatccgacgaagcggtagcagctatcttgatgatgggctctatgcaaaagtatttcacataccaattcactttacggtgtgggattccgtctgtcactttgctcggcgaacgtgaggactgggcacttatggtaacgaagattgctcgactagctcagctaggggacgagcctgctcgatttgctcaacttcttcggccggtgcttaacaacttcgctgcttccttcgacaaccccgaagcacccgatgtactgagtttctggagcaaatgtgcagacagaagaggtggcggaagcggaccaacttacctgactggctggatatcggttttctgtttctggggagaggatgggaagttgctatacccagaacggattcttccaatatgctcgcgaggctttcaggaacgggagacggagttcgaccttgatcaggccttgtcacgctgtatagacacagagaaagtccctctaggctacgtctccgtgccggttatagttgacaatcttgggcacgtatttgacactgtgatggtggctggcatgatcggcatacaggccattcccactagggaggccgggcttggttcgattcagccagtgtcggggtggttcatgtatgaaaagaagaaacgagcgtgtgccaaaacgcacaatccagttgacaaaccacctagggtattggattggtcgttggtcagacaaggcaagtgaagcaattgggtcattcggttactttcgtttcaatttcgcttttgttttgaatattggcattgcaatgttcgggaattcccttggtagctaatcagcagggtcgtttcaaatctcaatattgagagtcgctggaaagacaaatacaacaaacctttgttttatgtctattatcgcttgaacagaagataattaaagggaaaggccggagagctaccaaagagggacattacagagctgataatatgtgtatcatttcatggggctaatggtagctaccgaagaacagttggcctggtgactacataacatgcgtgtgcatggcgtagcttgttcgaatttggtccttggtgttgctgcttttcctctgaaccgacagtcgtaggacatgtgttgttctttcatatatcgaaaacatagagatcatccataccagcgacacagttgatacatcttcgacggctacacaagaatcccattgggcgaaaagaaaaagaaaagaaaaagaaaagaaaagaaaagaaaaacttcaaactaatcatacaattcatatcaattcctagagtaatccgaccgccccagtttcgcctattcccaatgatacaagcccaaacccagaattcagagcagcactggtgtaaaaagagccagtgcacatcaagttcaaataaatgatgaacatcttttcaacgggccaaaacagataaaaaaaacacgcatgcggtagaggtcaacaaataggggtaggggtaggtgtaagtgacggtgtcggtgacggtgtagcgcgagaatccgaatcaacggtgaaggacaaagtgtagagaaaaataaatcagcgtaagggttggtgtaagtatttacagacgaaggtaaagtggggagagaaaatagatccgcaaaagtattgtaggggaggagaggaacaagttgagaaatctcctagctggttgccgtctgggcagccggagcgtgcgggctcttgctggaaccttgaacggcgccagcctgggcactgccactgcgctggttttgaggagtggcgctgcgactgggcagaggtgcagcaccgttcatggcgggtgagctagtcgggccaacgcggttttgttgaccgggctggggaacccgcatcatcggggagaacccttggttttgaggcacctgcattccagaaccaccgttcggagcctggaagttagcctcatgggggacttggtagttggcctggacagcattggcattgatgctacctgcagcggcattcatcgctgcttgttgggacaagcgctgctgttgctgctgctgatactggttgagtcggtccgtggccagcttggtcacttgctcagggggcatattagggttcgtacgttgaatctggctttggagagtgctgatttggggcacaacgccgctcgaaagagggttgggctgacccatacgaggcgacggggttgagacgccttgtggtgtaccaccgtggaacgatggactctgcattcccccttggttctggagggcagccatcatagcagggttattaggtgtaccgttaacatttgacatgttcatgttcggcgatccctgagacccaaattgtgggttgtggaattgctggccctgctgagggtgctgctgctgttgccgagactggagaagacgctgctgctcttgcaatcgattggcttctcggatgacgcgcgtgttatcaggagaggcttgcattggcaggcctggtcgtgcccctggcgtttgctgcagttgagcttgcggcatcatcttcatggccattccattgggcatctgaccattgggctgtgcaccattaggcatgttctgcattgggatagggcgggcttgattgacaccagcactaggaggaatgccgtttgtcattccgttcggagttccacctggtagactagggttggaagtggggggcatggtgttgttacgccccggcgcattcatcatttgctgctggttaggtacttggccggaacgctgcgctgcgagactagcctatataggggataagccacagtgctttcaggtaggaacgttaacaaccactcactctttgctgcgcaatcatttgctggcggtactgttcctgcctttcctgcagcttcatttctctgtcgtacttcagccggctgaactcagccggtgacgagatcggaggcttgggctggttagcctcattggctttgcgcaatgaagcaaggtgggaagctaagagatgaaatgtcagtagagtccttgccatgatgttacgtgcttctattccagacataccatgctgctgtttctgaagcatagtttcccgctttttggccagctttcgcatggcatcaagcaaagcaagatgcttcgaagatcgtctccggtcaacccgaagaggctgagtagtcctccggcggacgggcggctgaggctgagcgttggcgccttgctgctgctgctgttgttgctgctgttgctgggcagcctgttgctgagccaacacagtgcgctgggcagtctcaagcctctggtggtaagctcggaagtattgggttttggacatatctgcaggaagaccttcaagccctacccatcgctcgaaacattcccacggagtgcgtctctcggcgccagaggtgaagagtgatggtggggtaaggcagctggaaattagagaccagttgtaggagtactccttgaccaagcgtcggagttcatcatcctcagcgaaagtccattgcgaggacgaacgtgattcaaagaaaccaacagatggcatggggtgttcagtcggaggccggaattgatggccagggtgaatccgatcacggatgggcttgttctctggtcggaacagcgcaacgtttgtctgctcgggtgccaattcggtgatccgattatccgaatcattgccgtactgggagtagtcatatcggctccgcttacgaggatgatcgtcatcgtggaaggtaatcttcgccgatgcaaatttggacactggcagtagttccgtcttccaaactgtgtcaggggagactttgaatgccggtgcgttcgtgccaggggcgatctggagtggtccgtatatcggcaattcgtctaacagcttttccgcggcaggggtcatgtcaatcgagaagttgaactcatccgagcccaaggagaagatagcagcgggggcgactgcgtcatgaatgtcgtgtcgaggctcatcattgaacccatcactgactgattcttcctcggcggatggcatgagatctggagtgggatgagaaacaccaaacacttcatcgccaacgtcgtcggagggtggactgagaaccgccttagaggagtccttttctgtcacggttgccgttggaatctttgcttggacacgaagtaaggtccgatgttccacgtcgctgttgacatattctgcgcaccaatcggcacaactctttgcagcagcgatcttccactttctctcctcccggaagtcagttcgcatccacttcatgtgatctaaaacaacgtcccaatgtgtgccctggcggggaggttcaacagagcgttttaattgccgcagtggccatcggtttgcattttgaagagcatagattcgccggagggtacggcaatccatctgttcttggtattcaagcagatgattactagtactcaaggtcttatgcgcggatgccagcagggtattgaggtttgttccccggggaggagcgtacgctctgttcaagaataatgtgaaaagatagtcttgctcctcgttcagcttggcaactgcatccatatctcgatgcgtcagatccgtagagtcggccttctcctgctgagctggctgcttgggaaacacgacagtcgagagtcggcttctctccttctcccgctccttgcggtccttgaagcgcatcctcgcgacagaatccggagagccttgatcagacggggtaactgggtggctcctatcatgagtgacactcttaggggtttccccaaggatctcggaaacagatttgtgccggatggctcctgatgatacccgagtagtcatgcgctctggttgcgccgagccaggttgagttggggggatagaaagctttttggccgtgggagtctcgacagttgaatctacagcgacttcggcttgtgcggttggtgacaacgagtcttgcacagtcgtctgtggttcttgtggtgctttcgcttcagaaggaacgggctcaggttcctggtcaacgtccatgcgatctgtatcgaccccggtgtccacactctccacaatcacctctttcaacgaaggtatgtcggcgaccacatcattcacaggtttatccggtttcgactgagcttcttcgagacgcaattgctcgtctggggttaagggaaccaagctcgggcgagggtgggcagatcggtcatgcttatgttttgggcgatcaattgccccaacctcctcagtcacttcttctgcggggcttgtgtcgggtgatgcggcaactgggacgggtgtattattattgtaagggtcaatggaggaggcaggtgatggtggttgttcgtgttgagatggtcccagtgtaacagagggtcgtgcttcgtgtttctttcgaagagagtcagagggaatctccagtgatggaaccccagtcgcggttggcttcgacacgcggggggagatcgttgcgtcattgtcgtgggcactgagcgacgtttctgctaccggtacactagctttctgttcggcgcgcgatgagtcgagtgactgcacagcgatcggtggcacgtcgagatcccttggcagcctagggctggtagctggcactgatggccggcgtgttccggttgtatccacgggggtaggtgggagatgagatgtcgcggtctgaggttggtctagaatgggcgttccgtgctgttgaggctcggtcgcatgcggagctccgccatcaacggttgagggtgaagtgatcccagcgacagctttggtgctggtggtggcagcggttgtcggggggattgcatttcgacttggtgagcgcgcgcgcgcatgggttggcggcggaagagtagcttcattaaagtaacgacctctagacagggaatcagcattgggaaattataaacaaaaataaataaatgcaaaatggattccactggcagagagtcaaggcgattggacttacttggagagatcattggcgtcgaggaaggcctgttctttctggtggtaatgagcgtcctcggtcgcgccaaacccgaccgtggctagatacaatgcgctgagcttgcgctttctgcgcgacaaacagtttctaaccaccaaattagcgacaaattcatcatttctaggcttcccaatcgaattcccgccgtcgaaaaaattaatacttacgcgatctcatcgtttttagatcgtaggagctcgtcacggagcatggagtctagcttcggaacgcagcatccgattaacgcgggaacaaggggaactgatcgagcgaggtcatccagatggaaaaaatcgctcgaaaaagatgaaaaagatgggtggagggtaggaggcgatgaaaagcacctggagcaggatcttttcgaagggggtgaaaatgaggttacagggcggtatgaaaaatgtggaagaacgggaaagatgttggtttaggtacaaccagttactcgctccctctataaaaaatacacggcttggccaggtacctggtacttctgaaaaattccctttgatgatggagggaaaaatagaacgtgatatcaacttggggatacaagaatgatgtctactttaatgagctataatatggttgtcaaagacatatgtgttttttagaaggctgctctcatcaactggtaacgcactgtattattgttctgacattcaattctccgcttgcgtatgtgaggcctcaggcataaaatatagtaaacacctaatatttatggcaataaggcatttatcacaaggcatctatttcctatcaaggcggccaataaaccgccggcagaaaatcaagaaaaaaagtagtccgctctccagatcaagctttcacatctacgatagaacaaactacgatcattatttgagcaatcatggtgaaacgcaagagaactgacacccccaaggaggacaagacggctggtactcctcccaaggctaccaaatccgcccctactcctccagagactcccgatgcagctttcactatccaagttgttacaggctcttatgagcgggtgctccatggcttcaccgttggtatccctgcctccagcctgaaaacaaaggctgaaggtgactctccggccatccaatgcatggatactttcctattcgaagcccatggatctgcaattcgttgtctagcattgtcaccactgcctaaacccaccgaccctgtcgatgcccaaaaggtgatgctggccagtggtagtacagatgagcgcatcaacttgtattcgatctccgccgcaccccctgccgtgaatgaagaatatccgtccgtgccgaccttcgccggaaacaagatcctcgaaaaccccagaaaccgtgagctaggatcattgttgcaccacactgccagtattacctcgttgagtttcccttcgcggacaaagttactcgcagccggagaggacaacacaatctcggtttccaagacccgcgactggaccgtcgtatccactatcaaagcaccaaacccaaaaatccaaggacggccaagcggtgatacggcgcctcccggagctgctccatctggagtgaaccactttgcagtgcaccctagtatgaagctgatgctgagtattggacgaggagagagatgcatgagattgtggaatctcgtgaccggcagaaaggctggtgtgttgaacttcaccagggaagtcctacaaggtgtcaaggagtcgagatggagcacaggcgaaggtcggcgcattgtatgggactctgagggagaggaattcgccgttgcattcgaatggggtgcagttgtgttcggaatcgtaagttatctggatggtataccattgatcaaatttctgactattagcacaggactcgattcccaggtgcagacttatccctagcccgcggagcaaacttcaccagatgaagtatgtgtctttgcctttgaagggtggtgaaaaggaagatttcttggctgtctctacggaggatggccgagtgatcttctattcgaccaaagaactgaaaaatgcggaggatgataccgaatgctcaattcctcatgctacgcctgttgctcaggttggtggaaagcaagctgggttccctggccgcatcaaggacttcgagatcctcactcttgagggtcaagcaaaggaattccgcaacgacttcttggtcgtcaccgccaacagtgacggagttgtccgtgtttggaaggttggtggaaaagaagtttccgcagcaaagcaagaaaagaaggatacgactcagattgggaagctcttgacgacaaatgaaactggtaaccgcatcacatgcatggctgccttcgtcatgttgcctgcggaggacccgtctacactgatagactccgaagacgactccgaagatgaagtggagtcctcgagtgatagtgacgatgagtaacctcattattctcaactgttataccctttataccgtcaaatagatccccagtggcaaacaatgtatcatgagtatgaaaagaacctgggattattgccctagaaaataattatgactatgttttctaccatttttcttttcaatatcagtattcaactcacctaagaatcatttaacgtatgttactcctgtcgctgctatataaacctggtgtggcgcacttcatggtgtagttgtcaaggattttcttagataaagatgaatgagtcacccacaataaaccaaccttggaagagacagcactaaacctgtatatataatgcctgaaacaaacgcccaagtgaattatattatctagtatacttactaaaagtgttataacgtagtaggaaacgtagagttgccatccagacaccgcccggctctccactacacacaatcccccacctacattctttcattatcatatcgcgggaagcaattttcacccgaccttctaccatcccacaagcttcgtttagccacttgcgtttttattcaacgctgctgttaatcgcgagttgatttcctattccatttcgcaattatggcatccaacggcgacttctctgacgagggatcccagcccggctcacctttactcgatgcccacaatgcccgcggagaggtcgaggaccaggagccccttgagcaggaagagaaacctctcaagtctgctatgaagaagtccgagcctgctcctcaaccgaagcgtccagaactccccgagcagcccaacccggacacgctcgatctgtcaaaattgacgcctctttcacctgagatcattgcccggcaagctactcagaacatcggtatgtgaccgttggtttttgaaagcttctgcgttcagaaacacacttcattcattaggtccaattttgctatataacaaatttactgacgtgattatcaggcaccatcggacatgtcgctcagttagacaccttcccttgcctttttcttcctacatgcatactaatacaatcttagcggcaaatccaccgttgtcaaggcgatctccgaggttcaaaccgtccgcttcaagaacgagcttgagcgcaacattaccattaagcttggttatgccaatgcgaaaatctacaagtgtgacagccccgaatgccctcggcccacatgttacaagagtttcaagagtgagaaggagatcgaccctccctgtgagcgtgaaggatgtacaggccgttaccggttgctggtaagtactcctgctccttcccctctgaagtccaagtcagagcctttcctcaagtggacctaatctaacctctgatacagcgccacctcaggtaccatcaatccccaatctacccccaaactggagttccatccttgattcattgggtataagctaacctttaatctaaaaacaaaaagtttcgttgactgccctggtatgtttgctagatcttctctgtccagagttagaacactgctaatcttcaatcataggtcacgatattctggttagtacttattctcttgtgtatcttgggaaactcggtttctctttgggtgtcgattctaatcagctttgcgcagatgagcaccatgctttcaggagccgcggtcatggtaggtttcattctccaccactgcaacaattaggatttcgagggatttgtgataagctaacatcgtttttctaggatgctgctctcctcttgatcgccggaaacgaaacatgcccccaaccccagacctcggagcacttggccgccattgaaatcatgaaactcaaccacatcgtcattctccaaaataagggtaaaaccatggttttcttgtcaaactgccgatgaaacgaagcgctgacgtttaaaaataaaacagttgacctcatgcgaagtgataatgcccttgagcattaccagtctatcctcaagttcatccgcggtaccgttgctgatggatcgccggtcatccctatttccgcacagctgaagtacaacattgacgctgtcaatgaggcccttgtccagaccatccctatcccccttcgcaacttcgaggctacgcctcacatgatgatcattcgttcgttcgatgtcaacaagcccggtgccgagatcgatgagctcaagggtggtgttgccggtggttccatccttaccggtgttgtaaagctgaacgatgagatcgagatccgccccggtctcgtcaccaaggatgagcagggcaagatccagtgccgtcccattttctctcgcattgtgtctctcttcgctgagcacaatgacctcaagtttgccgttcccggtggtttgatcggtgtcggtacccgcgtcgaccccacgctttgccgtgccgatcgtctcgttggtttcgttctcggtcaccgtggccgtctccccgctatctacactgagattgaggtcaactacttcctgctccgccgtcttctgggtgtcaagaccgccgatggcaagcaagccaaggttgccaagcttgctaagaacgaagtcctgatggttaacatcggttccactgctactggtgccaaggtcctcggtgtcaaggccgatgccgctaagctcagcttgaccagccccgcctgtacggaagttggcgagaagattgccatcagtcgccgaatcgagaagcactggcgtctgattggatgggccaacattgttgcgtaagtctacgggtttggtattacttctagtgacaaatgctgactgtttcgattctcagtggtaacaccctcgagcccgtgcagcagtaaagcaatcctttcaacgatttcccagttcgaaatggggagcttggggaatgaggtctgtcatgtcggggaatttgatttgcacataacacttgctacctatatccccggacaacgacctcaccccaccgaccctcgaacacgagtcttgcgatctatgattgcaaaaaagttttatggtcataagtcataacgaatcagagaattaaagacgtgatttaactgattccccggctgaatagagaagatggaggagtcatgcaacgctgtattgtcgccaccttgatcggtttacctgcttcatgcatgtcagcgaccactttatctggtctgcgactgtgtgctacggtttggtctgagggacggacgacgaacggggatgctggtgaagtcggcgaataagatatgtgctttttatttccatcgtacgagggagttgttttcaagaggtttcctgttcattgctcggttttttgtctgcatcatcggatcttatgtagataggcctataggtacaggtctgggtttaaaatgcagggaagttaggaccagcacagctttaagagcttctgcatgtttattctatttacagatgggcttttcgtctgatgggaatacaaaaacattcgcaaatgagatcgatgctcccactagatcgtccgcatgtcggatgtatatattctacctaggtactacatgtatgactaccaccactcgatatttcctcacaacgtaatgaccatgcacgcttgaccaccaggtattgtaacatacagggaatcacaagctatactaacattcaaatgatgacatctacaatattcgactattgtgctgatcgaccgttgtagcagcccttcatttacctttaatgttggcagagtaaaattcaatatagtcatattaactcctcatctcgcaccccagatattcggtttagaatgaacaagattctcgtcaattaataggcccaattcctgagatggacgttgcgttaggcccccggggccatgggatgatcctgacatgcaggagatctgactaaggcggccgataataacaaagtagcatcttctgccttgaacaacgccctctttcttcggctagttgcgcgttttcaatcatgtatatcctcgaggtaagttgttttgattgagatatcatcatgtttccacggtgaatgtgctttctatcgtggacatgtcgctaatgactgtcttcctgcagcaattggcgcgcttgctcgatcgcccgttcttcccatggaagaacgtgcttgtgggcttttcactgggccagttcgtccttgaaggtttcctgtcacttcgccagtacaagtttttgcaacggacgaagcctcccaaggttctcgaaggggaggttacccagaaggtctttgaccagagtcaggtatgaacccgatcacagagcattatgccatatacagaggctcattggaatatcatcacaggcatacggtcgcgcaaaggccaagttcagcttcgtttccggtctttacggtcaagtccaaaaccttgcattcatctacggtgatgttctccctaagctctggggcctcagcggtctgctgctggctcggtaccttcctggtcggttccaaggcgaaatctgtcaaacattggtattcttcttcggtttcaacattttaagcaccatcctctcgctgcccgtctcctactacaacacgtttgtgctcgaggagaagttcggtttcaacaagcagacggttaagctctggattacggatatgctcaagggtcagatgcttggaattgtcttgggaactcccattatcagtgccattcttaaaattatccagaagtttgacagctcgttctactactacctctggctcttcggtgtcttcctccaggtcttcgccattactatctacccgattgcgattctgcctctgttcaacaagctctcgcctcttcagcccggtcaactcaagaccggtgtcgaaaacttggccaagagactcaacttccctctctccgagctgcacgttattgacggcagcaagcgcagtgcccacagtaatgcctacttctacggtctgccatggaagaagcacattgtcatctacgatactctgattgagaagaccgagcctgaggaggttgttgctgtgctgggccatgagcttggccactggagcctcagccacaccaccaagctgttcggcattgcccaggtacgaactttctcagttgctgttttgccgaattatcactaactatgcaatccaggcccacatgttctacatcttcgctctcttctccgtctttgtcaacaacaagtcactgtaccagtccttcggattcatcaacgaacagcctatcatgattggtttcttgctcttctccgatgccctggctcctatggatgctgtcgtgaagcttctcatgaacatcctcagccggaagttcgaatttgaggccggtatgctccgttcaacctgtcacatatactctcggttttactaacagtacccccccagatgcatttgcccagaaccttggttactccgacaagcttgcatcctccctcctgaagctccagatccagaacctgagcactatggacgccgatccgatttatgctagctaccactactcccaccccatcctcaccgagcgtctcgccgcgcttggctggaagggtggcaaggtcaccagcaacaaggaggaagacagtgagaagcctgtcaaggccgcggaccgcgagctataaacggggtgcgtgttattggtgactttaatatgatatggacgtgatttcttttgtgcctgtgatatcttggaatatcaatctcgagaagcaaaaagcgaggcttggaaatgttccattatgtattgattggattgtagcaatctgtctaatctctaaatgacactttttgtccagacatgaaatgcgagtacttttttgtacgtccaagacctaacccagcccacaggaatagagcaatagaacgaatgaaagacaagagactccgacccaatgcagcaacgcccacaaccaaatatatacccacacactcaatcggattcctcagccttcgcctgggccttactcttcttctccgccaaccgtctctccttcttcttccgcttgcgctcctccttatcaataccggcctcctgatccgcgaaagcctcagcctcagtgccaaactcagcgtcatccatgacaagatcattgctatcatccagttgttcctggttgttggtttgcggaatacccgccgcaacatccaaatactcttctccggggttctgcttcgcgacggtcagatcgcgaccgaggagctcgccggccagacccgcttgcacacgcttcaggttatggaggatcaggttcggcgctgcagcggtcgtccgtgagacggggccatgctcgctgatgctggcgttgggttgcaaggacgggtctgtcgcggcgcggtccaggtaggcagctaggaattcttgcgcggcggactggctgatggtctgtgtgttttgcactgtgactggggggagggcctggggaccttgggttgccattttggtgggattggtattcttcgccgggtttgatgggcggtttttgaggttaaaggggcggtggtgccgattatggagtggtttggcccggtggtgggattgacaaagccgggagtagagtttctctcgaggtcagggtcactttgcgagcagtatggagagttgcacgggcgacgttggacatttcgcatctcgagatcaaaaaagttcggtgacgctagtcccgatcgggtaggtcttcttaacgggatgcgctgcaggtatagttgatatttattgacagataaacgaacgtagttatgtagtagttatagaattataagtagatcgtgcactaaacattgtccaattgcgtattctatatatcctaagtaattaactgtacatccttgtagacatacatctctaggcgggtccgtgccagcggctccgcgcttaattttctgtcttccgacgccgcgtcttgtccaccaggcctcacttgatctccaactccgaaatctcaccccaccgtcaatcgccctcggacaaagccagagccctgaaaatgttttgcctccgcgccaaggccgtgccctcagccttccgggccaccacatcggccatgcgaaccccgatgaacaggtacgcaaagcacccaacctttccaacctctataccagacagctaacacttctactccaccttgcaacagattcgccaaaatcccgcaacaaccaagcacaccttccacaatgctctcatcccgattcttctcctccctcctctccacgccaacccgcttccaagcctcgcgaacactcggcagccgcctctcctcgccaaccacaaccgcaaccgcaaccgcaaccgccttctcacccctgtcatcactcctctcccagaaggcaccctcgcagactcgatcattctccgcaagtgcctccctaggcgtgcgccgtgtgacattccgtccgtcacgacgggtccaaaagcgccgccatggatacctggcacgcaagagggacagaaatggacgtaagactcttatccggaggactcttaagggccggaaggagttgagttggtgatttattcgtttgtgtgtccgaccttacaatccttccggggttgttgtggaagaggacgggatttataccacagaggactagggtgtcatggattgtggaatctataacggctcacggcgatggtgggaaggcagtagggggccaattactgatgcatccacttcttggaactattgaagtcttcaagattggatccgagttcagacaggacagttgctggcgggtcttgtctggcgtgtaccatatttacctctcccgaggatgtgtgtgactacatttcatatagtgcgagtttttcagctttctttgtttcagtcgagatcccggcgtttactgggttgcagctttgcagcaagtaaaagagtagattcatcactgtctaggttgtgtagagtctcttgacaccacaattctgtctatgtgatctacctagctacccgtgtatagatcgttcatcaaacatatcactcgcgttcgtcttcaccaccctccgatccagtctcggagtcctcatcatcatcgtcatcgtcatcgtcctcatcttcttcctcgtcgccaaccttcagaccatagtcgtcctcgaattccttaagaggctgaactgtgggagtgaagccggaagtttcgaagccctgcttgatggtctgttcgcaataaaagttagcaatacatacatctatctgtcaattgaataccggggaacaactcacctcttccaacacagtcgcgcaggtgacaaccatgtttgcagtcttcggatcaaacaacggcaagataatcttacgcagagcacccttgatctgatcggtggtgatggcgcggacgttcttgagcatcttctccttatagtcgctgggcaagttgcgcacgacttggcggatgaaactgccctgggcagcattggcggctgtcatctgctcattggcgtagttgaccacgatgctgctgatagcaccctccaacatcaaaggatcgaaaggcgtagcgccggacagatagttctcaacaatctgcttgctagactcgaatgccttgtgggcgttcggggaccggtacacatcgaagttgacaaagccagtgtcgatgttgtagctgaaattggtgccgtatgccagaccagtgccgcggacagcaacccagaggggaccctcgacggcgttcatgtacgaaatcgcgaccagcagggcgggcaggtccggggaatcgtacgagtccagaccacgggcggtagcgtacgcgaaagacgagtcgacagtcggcatggggacaatgtaagacttgccgccaatgttcttgccggcctcgctcagccgggaccgccggtcagtgataggaagcaactcagtgctggtgccgagggtctcagcgaagggtttccaggccgagacagggttctggagtttctcgagatcggcaataacaatgacgcgcacgttgtcgggccggaagagcgagctgcggatctcctccatgcggcttacgatttcctcgggcttctcggcgagcagacgcttgacgcgcttgaggtagcgagccttcaccaaagtagaacgagcacgggtgatcgactcctccgcgtagtgaaccatcacatgtgcagcagcaagcatgtcgtcaccactgcgcttggagtcgggcacgtcggccaagagacgggagttgatagcccggagtctctccacgtcaaagacggacttccagcacagctcctgtagccaggcgacggcgttcgcatacttctccaactcgacctggaaggagatacggagcatctccgagtttccgagaccgcgagcggtctccatcgagtatccgacggtgtctctctctaattccaccacgacctgttcaaagtccattaccttgccatcacgctgcaccggaatgttgaaaaacgcctcggtgtagatggacagcaatggacgcaactgaacgggcacagtatcagctgagatgagaactgaaagctggacaaagctactagggatgtgctcgaagtggatgaaaagagactggtcagacttgtcggcatcaacaatggattggaccttgttgttggggcgtccagccttcagggcagcacctgaacgagccgtggtggtctccatgaagtggattgactcggttccggggatagtgaactcttccagcaattcctgtggaatctccttgtcgttctctgccatggccttttcgagtttttcggcaagctccttcaggcccttctcgccgagacgctccttctgcgcagcggcccggtcctcctcgtcctttttcagtgtggcggacatcttctgggatgggatacccaagatggtgacatgggccgcatccgagatccatttcttgatgaaagagcgccactggtcctcggaccaggtctcaaggacatcatattccctcagagttgcaacatccatcaaagtcgagccatcacgctttccgaacaggaagtcagagataacgtactctgcgaatgaagaggcagaagactcagtcgagaacttccaggttcggcgctgccgggcgatgcactctttcaagtatttcagatctaattccttggccatcgcatcttggaggatctcaaagaatctcttctcaacgctctccagcttctctgtttccacgctggtcaatgtgaaacgaacctccatgctaggatgatcctcagttgcatagtaaacggcactggcgagctgttctttctcaacaatgatgttctctagcagggctgcagatgaaccggccaggtacagaagggacacattaagagccccggctataatactgtcagtatcttatttcaggttttcgtgcttgggatcttacataggacggggtcagtgcagtcaggtcccatgaatcgaatttcaatttcaccaaatgattcatcctcttcggggaactcaaccttctgaataacggacttctccaagtagggagcctgcttggaatccacccaaggtctcttgaatggtgcatccgggctaggaatgacatccaagatagtgtcttcgaacttatccaagatctccagcatgttgtcttggtcgacttctccagtgaggatcaggcacaggtttttgggctgatacatctcacggtggaactcgcgaattcgttccgcaggtaggacacgaagctgttccatcatacctcctgtctcataacggaagcccacgccaggcgggtaggtcaaccgccgggctgccaggtcgatcagctcagcggcattgttctgcacaccctgcatttcggagtacacgacaccggcatcatttccagagccatcgacgtggtgaacctcagtgtagcagccttcgtcagtcagagtaggagcaatcacatgctccaggtagactggcaggatacgagcaaagccttcccagcctgcggtatccagcgtgtaggcagtgtgatcagttgccgtccaggcattggtgctggagtacacgcgtgtagccagcttatccaggaagcccttgtagcggtaattgcgggaacccatgaagcacaagtgctccagagtatgaggagcacccgaatcatcgtggatctcggtggcaagcacaaagtaaccgttcacttttggacccggctggtcgataacgaccactctcatgccggtgcgctgtgattcatactgagtgaactcactcggcgagtaatcaggcttgaactgctggagcagtttgaagtgacttttctgcaccgagggcgacatattgatcaatgggacagacccagtgaagatatttcgccgtaagtttgagagtctggttgtcttcgttagtaattcgtgtccattaattgagaattgatacagtcgtgagcacatcaacacattcacaatgaggaatagtctgataacaagtacaacaaccacaactcggatgagagaagaatatccactccgagcttacgtcaaatagaatgcgaacaaaagcagcaacaagcaaatcctttccaaatcatgtcctttcaggacatatccggcagacctgcgacatatcgccaaggataagtggcataagtggggtggcgagcagaaatttggggatagcaggttgatacacttgatacacccctaggcaataagaactaagaacgcaattcatatgggcttaccgaaagcacgtacttcgactcaggaggaatatccgagacacggtgagtctgaaatgacaaatgtcttcgaaagtgtgttggtcccggagttttccaagtttgggggagacctctccggttttccttacaaagcgggcaagtgaaagaatctatagaacaaagaaagaaatattagatctcaaattattttgcaaccagtcacattcaaaagaatatatatagtcttatcaaaattctagtaaaacttagagctctagcagctcaagcatacagcacatacaccacgtgggggcggtgacgcccaaaccttacgagtcacgggttattgacagctcaactctcctttacgtgtctatctccgaaggtccgaagctcttattccctgttggacaatccatttcggaaaaaaaaagttgaggatgacaggaaataccgaggagctgtgccaggcggtgctaggtttcgtcacccaaggcacgtatcccgaggagagtgtagttgctggtaagttcccggcagctgctctcgccagggaacttgagcttatatcgaaggcacgtgagcaggtagaggtacagaatctccaatgtctatctacatacgtcggtggtcactgactagctctgctttacttgattagaatgagattagctccttgagtcgcgagaacaccttcgatgccgacgactggattatccaagcgaaacaactccacgccgacatagaacgctcaagattgactgcgcgagaaatagtcgcgcagcatgagcataccgaacccctacaggcaaaggttgaagatgcgagggcaaaagtcgccttggttgagacggagattgccttcaatcaggccgtagcgggtaccctagaggaggtgcaccggttgtgccagcagctggaaactgggcgagctgcgctcagaagtggccagatcaccaccgccattgagcaattggagtctgtcgacgcagctgttggaaaagacgccttctttaccaatacaaatgtgatgggcatactctctgacgaagtgtcattgctgcggtctgagattgttgaggctcttcgttcccgctgggctgatcaattgaaagttgaccgaaaacaaggcgaattccatgtctccagcgcagacgcagatgcagattcacttcagagcactattacgtcgctgtcccgactggatatactcacatctgccattgagaaactacaaaaggatctcttgtctgcaatcgtaaatccgatcttgctacctcaccctgatggaaccagccatggtgtggtggtgacggagaccagcatccgcattgagccagaggcctcaaagacaaccgcactagagaccttggatcgcctttccagcgttctgggctacttgcgacaaaatttaccgtcattggtgtccgcaaccttctccgaatcgttcattgtgactatttcctcgaaagcaatctccgagtggctatcctctgctattcccaccgacctggctggcctcgccgagtttgagaacatcctgaaccatgtttcacagtttgccaagcagatagagtcttggggttggactggccaagaaggactcgtctcatgggtcaaccaagctccacgcctgtggttgactcggcgtagagtcgactcgctcgatagcgttcgcaaattccttgctgccagccaaggaacaacgaagcgggtcgaacgaattgaaaaggaaaaggtttctcgcgctgagggtgctctactggagaacgccggcaatgaggactgggacgcggactgggacgacgataatgaagatgagcccaagaaagaagaagcaacaaagcctgatggagaagaggaagatgtaagtgcgtggggtcttgatgacgaggacatcgaggagactcccgatcaggccaagccagagacagttgcttctacggacgaggatgacgctgatgatgcctggggctggggggatgaggatgaagatgaccataaagtcgatgataagccttcgcagccccagaacacagcagcggtaaatccaaccgacaagaaggatacggctggatttgtatcaccgaaagaggtcactctgaaggaagtcttcacgatcaccgatatccccgagtctgtccttgcggtcgtccagcagcaaatctccgattcaaaggatatcttgcagcctgcgtaagtcatgccttttttcgatcttaaagtcttttcttgccatcaaactaaccagagctcagccatgcccgttcccgcgttgcttcttctggtgctggtctccttgcactgccgacgctgatcttggccatgttcaaagctacatcatccacattctactcgctgaagcttacttcagggcagatgtacctttataatgatagtctgtaccttgctgatgaaatcagaaaactggttgaggaacatcaactctccagacttcagcccgatgttgaagctttggagaaatttggcaaacttgcgtatagcaaagagatgcagacacagcgcacgatcgtcacagatctgcttgacggagcccaaggatttggacaatgctctgaacagccattccaagcagactgtgagaattccgttagcgcgactgtcgaccgacttcgcgatgtttacaaggaatggcaacccatactgtcccattccgcgctgctccaatcagtcggatctctcttgtctactgtgatcaacaaggtggtcatcgacatcgaagatctaggtgatatctcggaggaccagtcacggcagctagtctccttctgtaaccaaatctcaaaattggaggacctcttcatgcccgagacaggtggcgatgccgaggcattgccagtcacagccatctacgttccgagctggctccgtttccaatatatgatcaatattctggagagctccctcgccgatatcaaatacctttggatcgaaggagagttgggcttggagttctctgctgaggaagtgattgacctgatcgaggccttgtttgcagagtctgattaccgtcgacgtgccatttcggagatccgaaaggcgcccagaggataaaacccatccacacaatagaaatacagttattcaccaggtataacttaaagctgcaggtgtattgcaatcaagtatgtagaccaagtggagacatctccgcgctctgcgcaagtgtgccgcacaggtcaccgtattttttcctcacccgtcgaaaatgcgacagccactaaaaaagattccatctacaacaacggcagcaatttgaagtatttcacaatgagtgaagatttggttactgctggtgcagcagaggctgtgcagagacaagtccgagtgcagctcatcagccaggaggaggatattgctctgcctgaaagcaccggcccaattcttgttcctactggtgagactcattgtcgatcaaaaatcataaatgatgatatcaagtactgacttttccttcgaaaaggacttcgacgatacgcgctatcgacattagtgaacaaccttctctcaagcgaaaagcccattccatttgagtttttgatcaatggaacttttttgcggacctcgattgatgaatatttggtcgacaatggtatctcctctgagacgacactcgagattgaatatgttcgagctttgatcccgcccctgcatatcgcctcattccagcacgatgactgggttagcgcgacagacgtcctttccacaacttcacctgctgcatcctgggcctcaggcgcgaccttcaccaagggccaggaaagaatcctatcaggaagttatgatggtcttcttcgcatctggaatatgtcgtctgagactattgcgacctctcctgccgccgcagatggtggccacaccgcctctatcagagccgccaaattcgtttccccgaaccagatcgcatcggcaggtctcgatcgcacggtccgattgtggaagtataccgagggcgaaggtggtttcactggaaaaatttctcctcagctagagctgtatggtcacaaggctggaattgagtcactagcggttcatgccaagtccaaccgtctgttgactggttctgcagacaacaacgttggattctggtcaaccaagaaggctgatgccccagcagcacctgagaacttgcttccttccagcaatgctcggaacacaaagcgccgcaagctgaacacatccgtcagcacacctcagcgtggtcctctggctcttctgtcagcccacacggcgcctgtctctgctgctatcttcgacgcgaaagatgctactgtcggttactcggcttcatgggatcactccctgcggacctgggatttggtcactggttctctggttgatactcgcaccacatcacactcactgctctcgctcgagcacctcccagaactcagcctcttggctgccggtactgccgcccgtcatatcactctgattgacccccgtgcatctgccacgactgtggctgctatgactctccgaggccacaccaacgctgttgtgagcttggcccgtgatccccacagcacatatggtctcatcagcggtagtcacgacggcacgtgcagaatttgggacatccggtctaccaagaccgacaaggaaggtgttgttggtgagagtgtttactcgattacccggaagagcctcgaggaggagggtaagtcggatagcaagcgggttggcggtgaaggtgtcaaggtgttcagcgtgtgctgggacaagacggtgggcattgtcagtgcgggtgaggataagcggatccaaatcaaccgcggcgaaggcgtgctgtcttcgaaagcatgagtgcacatatgggcctggcgtttaacacttggttgagggcaaaagtttagacttacacatatttttttctccttactttccaacttcgcgtatatctttagctcgcaattggatatataccaaactgcaaactaatagtcgctacaactttgccgtaaacatatttggttttgaagcttccatttaacccaggtttatgtctagcctataatacatccacagaggggttccattcacatacaaactggcaaagaccgagtgccaggaatcaatacaacgccaaatccatgcctctcacgcaaaatagtgagacaatcccataaaagtaacaatcgaacgcgaaaccactaggcttatagtctccgctccatgcggttcaacttgacaggagttttgatctattgagatttcgttagccacaaattcgcttaatgtctctgagagacagcgcaagctgagatatcgcaaaggggaaaagggaaacccacttgtgtccgtgtccgctgtcccctcacaggcaagcccaacgcatggcgtcggccgcggtaagttccggtctctttcatgcgcttgatatcgttcagaacttctctgcgcagatcgttctcgattttcatctcagacagcacagccgtgaggtcgagaacctgtttgttggccagctcgccgacgcggcaggtcgggtggatgttgaagcgggacatgaggcgggcggagctgttgttgccaattccgaagaaggtctggagggacttctgttgtactcaatgaatgttagttggatatcgaggttgcgggcgcaatcgtgagggtcggcttgccttgagcaggttccgctcggggaagttgacaccaaggatgaaaacctaaagagttattagcggagttccttgggacgatatattccatctcgacagtggctctcataccatcttgaactatgttggctggctggtgtcctgacaattgtatgggccgtcacttgttgctctcgttgaaccccgggagaaatcctccgtcaacgtgaaacgtttttccgtaattcgatgcctgaatttcccggcagtaacacatctgttctccgcacgccattgcaagctggccttctttccccccaattgcttcatcttcccctttcactgtatcctactagagcagtggcaattagcaaacatgtatttcaggaatctatttttgtcccttttcttcgtcttcgccgtcggctttgcgctggttcaggccgaagagtccaagggacctcgcggccctaagattacctccaaggtgattgacattgatgttctggccccgtctatatgcaggcagttctgatttttggtgacaggtctacttcgatattcaacatggagatgagtccctcggtcgcattgtgatgggcttgtacggcaagaccgtccctgaggttcgtagaactatatccatttggaattagcaattgagactcgttgctgacattattactctggatagaccgctgagaacttccggtatgatgaaattgctatgtcaaggcctcgaatgtctatcctgcatatgctaacccacttctagcgctctggctactggcgagaagggctttggttaccaggactctaccttccaccgtgttatcaaggatttcatgatccagggtggtgacttcaccaagggcgatggttcgtgagcttccgagcaggttagattttataatactaagtatgtacaggcaccggcggaaagtcgatctacggcaacaagttcaaggatgagaacttcaagctgcgtcacaccaagaagggcctgctgagtaggcatctccgctcctttgattcaatctcacagggatctgaccattcttaggcatggccaacgctggcaaggataccaacggctctcagttcttcatcaccaccgctatcacctcgttcgtatcccttgtaatgatttccttggtgcaataactgacttgaaaccacacagttggcttgatggccgccacgtcgtcttcggagaggtcctcgagggctacgaaattgtcgacaagatccagaacgttcccaagggacccggcgacaagcccaggctggcggttaagatcgtgaagagcggtgagctcgagctcgagcccgagactgagaccgaggacaaaggtagccgcgatgagctctagacaggtgactgtctgcgcgatgtttcctctgctactggtcggaagtggctgatgatgttggatgtcttaagaactcaaccaagagccgggtgtcaccgacaaagcccccgatgcccccgaggccgccgtgccatcttactccctgcagccggccatgattttcttcgttctggtcgccgttgtgggtatctggattgcccgtcggcgaggccagcagcaacagcaacaacaagagaaagaacaatatgttgcataagagaggatgttagatcaattatacgttattttggaccctcggcccgcccgcccctaaaaccctggatttcaatgcccggtgactctcatcatcataaattgatagatcatctatggatgtttccttgtggtcacgtaggtggtgatatacttccaagtacttcgtccagtcaaatcactcgcctcctgtcttagtcagacatggatctccagaccgcccgcgagcagcaaatggcgggtagaaatttcttcagtggcggtaagtacctggttggtacttctggtaagcgggttttcacactataaaattaggttcttctgttgtacctccaatagccacacagcgccccaactctccaacttttgttgcctccttcccacagacttcatccgccccgttctgtttctcttgattcaacccccctccatcatcccttttttctcactactcactctctctctcactctcactctcttctctctagagttcttagattcgggagatttgcattttccatctactctgtggttttcctgagctttcttgtttgccactcgatcttttttttttcttatcgagttgaaacagaaaagcgatttgatcttttcaccgtctctctctttctctttctcttctcttaaaggtacactttacgtgaatttcttatcctttgcaagtatcttttgcagatcacttgtgctttatctaccaacgaatctttcccggtgaagcaggaaaaaactgtacgcagtaaccttcacctgctttcatcaacgtcggacatcttttaactcttgctctgcgatagacatttccaccgcaaaaatggccgacggtttgcaaatgggaaacctttccctcaacgagtcccagcacgccccccagggtaacgcccctgttggccgtgccgcctacatccctccccaccttcgtcagcgtggtcccggccctgcccccagtgctaacgctggtgctccttctggcttcggtggtcctcggtacagtacacgaaagactgaacatcgtgaagcggcaactgattttgtgtcttctagtgacggtggcaactgggccaacgctaacgctcccaacttcagccctcgtggccccgcgaacggtatgaccagctggactcccgacggaaaactccgacccttcaatcccaatgcttacggaaacccaggctcttatggtggtggtagcagtggcggctacagcggtggtggtcagcaagcccgtggatcaggcgatggccagtggcgcgacggcaagcacgttcccggtcccgccaatgctcgcttggagcgcgagctgttcggagtgcccaacgacccctctaagcagcagactggaatcaacttctccaactacgatgatattcccgttgaggcctccggaaatgatgtcccggagcctgtcacccagttcaccaaccctcctctggacgatcacttgattgccaacatcaagcttgccagctatgtcattcctactcccgtccagaagtactcggttcccatcgtcatgaatggccgtgatcttatggcctgtgcccagaccggttccggaaagactggtggtttccttttccctatcctctctcaggctttccagaacggtccctctgccgcccctgtccagggcggtggtggtcagttcagctacggccgccagcgcaaggcttaccctacctctctcattcttgctcccactcgtgagctggtctctcagatcttcgaggaggcccgcaaattcgcttaccgctcgtgggtccgcccctgcgtcgtgtacggtggtgcagacatcggctcccaacttcgtcagatcgagcgtggttgcgacctcctcgttgccacccccggtcgcctggttgatctgattgagcgtggccgtatctccctggctaacatcaagtacctcgttcttgacgaggctgaccgcatgctggacatgggtttcgagccccagattcgccgcattgtcgagggtgaggacatgcccgttgttgacaatcgccaaacactcatgttctcggccaccttcccccgcgatatccaaatgcttgctcgtgatttcctcaaggactacatcttcttgtccgttggccgtgtcggaagtacttcggagaacatcacccagaaggttgagtatgtcgaggatgccgacaagcgctccgtcctgctggatattctccacacccacggcagcactggtctgaccctcattttcgttgagaccaagcgcatggccgactcgctctccgacttcctcattaaccagcgtttccctgcaactgccattcacggtgaccgtacccagcgcgagcgtgagcgtgctctcgagctcttccgtaatggtcgctgccctattctggttgctactgctgttgctgcccgtggtctcgatatccctaacgtgacccacgttatcaactacgatctccccactgacatcgacgactacgttcaccgcattggtcgtactggtcgtgccggtaacactggtatcgccactgctttcttcaaccgtggcaaccgtggtgttgttcgtgacttgctcgagcttttgaaggaagcccaccaggaggttcccgctttcctggagagcatcgcccgtgaaggtagcggattcagcggtcgtggccgtggtggtggtggccgtggccgtggtgctgctgctactcgtgacgtgcgtcgtatccccggcggcatgggcggtggctttggcggtcccggcggctacggtggctctggaggtgctgccccctcctacggtggcggctatggtgctcctgctccctcctacggtggtggttacggcggcggtggctacggcaacccctccggctcctccggcccatcttcctggtggtaaatcagtcgtggtcttttgacgatgccctcgggtctgattggctcccttgctttattttcttttgtctctcattgacggatacgatcagattgagtccctgagttcttttctacctgtgctatctctcagggacggctttgtcatgactgcacgactttcctatgcttgttttagattcatactttccccgtttgcgtatgctttaatctggttcttcctttgttgttcctctcatgtctctcttcgctgattctatccatggcctttaatattgccttgtatagatacgaggcattcgcgcagtccgatcttcttctcttgctcctaggagacgccactatctccgggcaacccgtggtcgacactgcatgaacatcatagaatgcgttgtctttgcttttttttttcctatgtccgctctcgtcagataccccttatgttcgagcgtcctcattggggatacgttcgagtgacgcgcgtgcgccgagcggagattgatgacttttcatcatctcgaaaagttctctttttctcttcgcattgatcttctcggtgttgttatggctgcattcatcatgtgcagcatagactttttacagcgtcggtatctcatggcggacatttgtttctgttgctgccctcgtgcgttctgcagtcgatttcgatttcgaaaacaaaaacgtgcgctttctttctccgggctcttttttttttcggatactggttatctcgccgctacatctcgcggcgcggctggtgtgtttcgaaaccaaaaatgggtattctttgcattctgtatggcgttggcttgacctgcaactgcatgtcttctgctttcgggtccgtggaggctgattgtctccgaataggagcatctcgcttcatttccttatctgttctgatcatttttctcggacctcgggggataggacgctgtcgccgctgaaagaatggatatacttatgaattctcgggttcggattgggagggacaaagcgaaccaacggccctaggatggccacgagaaggaaagttgtcttatccaatgcaatttcgaaaaagtgtttccaattattatggtctaggtgaagtaggtccttgtaggatgtacaacatagagtaagatataggattaatgcgtagtaaaatgtataacaccaaagatattaaactaaatgaggttcctagttattagatgaatgtcttataagatacattaatccaggtcaaaagtaccaaagtcctctagggcttatttccttggctctataaataatccaaaatgcgtggcaataatcgcatattaaacgcgtgaggtctctgatacgggtagatatcacaccagctataccttcatgggccactcggctctgctttcttcctctttttccggcttttgaacttcgtttttcccttttccctttttgcacttggcactccttttctcttttatcatttctattttcgtttgttttctcttatactatttctgcctcgttttatcggctcctagggggcactttactttataacctgcgattctcctagaatctgaccgcgaacctaccggtttcaataacccccaacatggccgatttcgaaaacagcatgatggacgagtccttcgcggcgtccgaagctgcggacgaccagtctcacggcatgaccgctagcgcgacggtcggtacaagacgacaggcgaacggcacaattggctctgtgtactccggcaacaagattcgacacctgaagaaagatgatggcatacccctatggcgcaaagatatccagtaccaattcctgaagctggtctttgaggacaagacgcccgtttttacgcggtatcccgacggacagaagggaatggacttcgccgatgtctacatcaatgcaatggcccggagcagcaagaccagcaagattctgaaggataagttacagaacgacaaacctgcggctatcaatatggctatggtctgtctgctggtcaatttcggtcgcatgaacactaccttaaactgtacgcttgcagcatatgccaaacataatttaccctctccgtgctaattgctattgtgttgttttctagtcttccccgagatgcgtgctcaactccgaacctaccactcgattccctcactacaagcgcaccaggactccaacgcctacaagcagctgcaggatgctcctcgtctcaagtccatcctcaagggcgcctcggaggatgtagaccagccgaatactttggagaagattaagcgacagaatatacctcgaaccaacccagtgaacttgatatttgtcctggcgcagtatgcccccaaagtgtcagaaacacacttctttcctccgcgagacttcttcgacctggtcatgagatctacacttagcagccaaagtcgcgctagagcgttcctttggctgatgtggtggtatctagaaagtgatttcagtcgtgaggctgctctgaataatccatttggtccaggtgcggaaggcgaggggtccgagggtcttcctctgaaagtacctccctttggcatcctgacagaggaacaagccagtgaggagaatttagatacgcccgaggaacaggagtacggggagtctaaaagactagagcgcaagcgtatgtgtttagttctgactgctgttgaagatgggacttgactgacatttggcgcaggcatcctggaagaagaggaaccactaccgcgcattcccaagcgacccaaaaaaggtgagctcgacattttgaatagttgtcatatatacgtcctcggaaacgctaaccttccccgcagaatacggctttgacgaagaatcattcgcaggagattactctggtatgggaggtcgtggctctgctatgtccacccctctccatccttctgctaaacgcagcttggatgatgaggacgatgatatgacacctggtcactcccgtccgcgccctaaacaggccaagcgggagtcatcacttaatcgagccgtgggccaacagcgactcatcttgaaaacgaggatggaacatacacctgatgcttcccccgctcctccgggtcccaatcatcccgtccttaatcgctttattacagagccctcgctttcttcagcacctactatgcgtcgaatgcggccacttacacagcaccagatagccgttgagcaaaatcgtcgacagaggattgactatctgctggccaaacgtaaatcaaacgcataccgcgttctccgtgctaaacgggagagtgagattcctttcgcgcgctacggtcgcttgcttcagggcctgcccgagggctacgatacagatgacgaagagatctcgtggggcaagggtggcctcttcccgaacccggaagaagaggatgactttggagaatgtgcaagcgtctttctctccgtagtgcgaaaagctgcccgccgacttgaccgctgggattacaccgaagccaacggccccaagaaggatcggaagagggagcgcgaagagcgataccaggccaaggcagccctagaagctgatgtgcgaaattccaacaacaaccgatcccgtccacgtcctcgccctagtgctgctgccaagcgcaagtctacgggtgtaacgggcactcctggcactaccaagaaagccgcggcgtcacaggctaagggcacacacgcccatcctgatgggttgggagctgggccatcagccgtgggtaccccaagctgggacccagagcacgggcccgaggactacatagagggggagctggacgatctcgaccgagaactccttggcgaggtttctggtgaagaagatgatggaggtgccccccgagtcgatgaagaaggggacttctctgacgatcaggatgacgaagaagatgtggacggtgatgaaaattcctcagcctatgaaggcgccaatggttacgcacgacatgaagcctcgtcccctgccccgaggggtccagctggcccacgcggggaaggttatggagacgacgcgatggaagactaatagggttggcgttttttttgctttgaaatcttgtgtatcacgatctactgtttcgtttgtcttttttttacttcctcctgttctctaggcgtattattcccttctgtaatggttgtgtttccaagtcaaattccacccaaggccttgatataagtggccagtactaccttgacctccgatatgcactgcatgtgataaacccctctttctcctctcttcatctgcccacttccatagctgcgaattgtttctttacacagataatctcaaatatcgcacacccgttcaacacacaagcttgatcatacgagttacggaagtccggtggcagagtggatacagatgctgtagagttcggtgtagccaacagtacgaagcggattcctaagacaaatttgttgagacaatctgtacttttccctctactcctcaacccgaattaacttggttttgacctgagacagatagcaggataggccttgttgcccaattgctccgaggaagtttatatttccggtaagcgtcatatcccgctaagctgcccccattctccattcttggtttctctcctttccccatatttgcacatttcgcctgacacattcccagacgcgcacaaagtatcctgtacgatatattacagctctaactacagaattgaagtcacccaaatcgtgttggacaaacaaaacacacagtttgtctttcgtcgcgaagactctctgtccccttccagagcacccaacagaaacgaggagccttggaatcaacacgcaagacaaaccagaacccgtttacccatcatgaccgaacagcctcgcatcctgcgtccgcgcccgagacgaccattcgatctgacgcctgcctccacggagtcatccggacctcccacgccggccgagtcaacaggcactgagtacctgaacccgaatgcagacgccgcgaactcaacgaatgtgagccgcacaggatcagtgatgaacctgacctcctcgacactgtacgggatctactcgccgacggcatttgacgggtttcgcgacgaatccagtccctggggtacggaagccaacagtccggcggcagagttcccgcccgagccattacagcgcgcagcagagaaatcggctatcgagccgcggcggatggcactgcggaggacccgatctcgcttgagccatggactgttccggggcgtgatcttgccgcaggcattgagcagcgtgctgctctttggctttggtcttgcttacggtgtgattacggttcatcttcatgataaccattggattacacctgtcaagctggagaatattcattactacgattcatggcagtacctaggcttctgggggttggctggtattgctctgggtaatctgcttccttggctggatagctgccgtgagggcgactctgattcgaagcttgcgggtaccaatgaggaggacagtgaggaccgcaccccatcttgggttactgttgcgcgcagtgtcggagcgtttgtcggaattgcatttgctatggtaagtggacagctgttgttttctacacttcccgttcttctctttctctatggacgatgctgacatctcgattttctttctacagcggagactcccttgggaatctaccacgcaagcatcgttgaccctcgcgctcgcgaaccccgttctctggtacctgattgaccgcaccacaactggcttcgtcctctcgaccaccgttggattggccggcatgggagtggttcttggcctcaagccagagcttgtgcccatatcgactggcccgtcattcggcaccactcttctgaatggaacaggactggagaatgtgctgggcgcaggaatcacacaggagagcattgcggtcggcacttggattgccagtgtcattttctgcgcgtgcgtgtgctttggaaatgttggccgtcagcttgccatcggagctggcgtcagagatgtcatgaagccatgagggtcgaaaagcgcctgagttttcctggttcgggatgaaagactcgagtttcgctggggaatggccttatatcagggcagggaacgtttaatgtacatctgaataatttatggctctgataaagaattgtaatagaaatcggctccgctgactttcagaaaccgtactctgtaggagattaaagaacccgtaggcctacaatatttacacaaggcgaagttctcgaggaaaaaaagttcaatgatatttattgttaaattgatcggtatgtagaatcaatcattgcaatccctactacatgaccagaggtcagcaggcactgcacccaagatcgacacctttgccagttggcacttggtctccattctctatacgatttccgtacttcatcagacaagtcttcgtaggaacgctttttgagtagaatgtgagttttgcgttgttcatgaagaagaaagaaaaaaaaggagaaatggcgcctctgagaaatctcttatgtagcctacaatcacgtgccacgctaagacctccttcataaggatggcctcctattggctggctctacagtggagcttcgagatcgatcacgtaatataacttttgctatcgaagccccgccgccgcaatcggtccgaccccgcggagtcatattttcttctttttcttcagttcgtcatctgctataccctcttcgcttggttttaggtatgtcattttgatcccttatttcaattgccggttgaatttgggaagtccttctctaaacagatctagtgtcgactgtcggatccatcatgtctcaaaagtccggtatgtcgctcttggacttcatagttccccggactatgatattatttgtcacagttcaaggtcaattctaatatccttattttggaattgaatagctatcatctccgtctatgacaagactggtctgcttgacctggccaagggtctggtcaagcaggaagtccgtcttctcgcgtctggcggtaccgctaagatgatccgtgaggctggattccctgtcgagtgagttacctctgtcatcaatggcacaattaagggagtgtcaagatcaatacacagtccaggcactgacaattaatcccagggatgtctctgccatcaccaacgcccccgagatgctcggtggccgtgtcaagaccctccaccctgccgtgcacggtggtatccttgcccgtgatatcgagtccgacgagaatgacctcgctgagcagaagatcgccaaggttgactacgtcgtctgcaacctgtaccccttcaaggagaccgtcgccaaggtcaacgtcaccatcgatgaggccgtggaggagatcgatattggcggtgtgactcttctccgtgctgcggccaagaaccacaagcgtgtgaccatcctgtcggacccccgcgattactccgatttcctcaaggagctcgaggccggcgccatcaccgatgccagccgcaagcagtacgccctcaaggctttcgagcagactgccgactacgactccgctatctcaggctttttccgcaaggagtatgctggcaacggtcagcagcagctctcgctgcgctacggtaccaacccccaccagaagcccgcctctgcctacatggtccagggccagctacctttcaaggtcctcaatggatctcctggctacgttaacctgctcgatgccctgaacgcctggcccctggtcaaggagctcaagcaggctcttggcttccccgccgctgccagcttcaagcacgtttcccccgctggtgccgctattggcgtgcccctgaacgagaaggagcgtaaggtgtacatggtggacgatatcaagggcatcgagacctccggtctggctcaggcttacgctcgtgcccgtggtgccgaccgcatgtccagcttcggtgacattctggccctcagtgacatcgtcgatgttcccaccgccaagatcatctcgcgtgaggtgtccgacggtgtcatcgccgctggctacgagcccgaggctctggacatcctctccaagaagaagggcggcaagtacctggtcctccagatggacgaggattacaccccggcccccgaggagactcgaactctgtacggtgtccagctgacccagcaccgcaacgacatcgtcatctctcccagcaagaccttcaacaccgtcatcacccccaagaacactacttcccttcccgaggctgctctccgtgacttgaccgtcgccaccattgccctcaagtacacccagtccaactccgtctgctacgccctgaacggccaaatcatcggcctgggcgccggccagcagagccgtatccactgcacccgtctggccggtgataaggccgacaactggtggatgcgcttccacgagcgcgtcatcggcatcaagtggaagcagggcaccaagcgtgctgacaagtccaacgccatcgacctgctctgctcaggccagaccccgcgcaccgacgccgagaccgccgagtacgagcgtgtcttcgaggaggtccccgctcctttcacccaggaagagcgtgaggcttggctcgagaagcttggcgaggttgctgtctcgtccgatgctttcgtaagtaatcctctttcatatatccgcccacattcactcttccgtggcaaatgctaattgtctccactagttccccttcatcgacaacgtcttccgtgccgcccgctcaggtgtcaagtacatcgccgcccccactggcagccagaacgacacccccgtcttcgagactgccgagaagctgggcatcacctttgtcgagcagggcatccgtctcttccaccactagattgttctactgggtgtcgtctttcggtgtctctttcctctctattcccctttcccttttctcgtaaaaaaacaggtgccgtctgtggtttccactgtgatggatattcgatatgatgatgatgtcaggttttctttttgaattagataaatttatacatatattttgagtacatgtgcgacatagtagttcatcctttctttttcgcaaggacttaaagtctgatcaactttaacatgttctcctcgcaattgaatcccctaatttccctgaaacgaaacgttgtcacatgggtttccccgtcggagctccgctgcaggggtactcaccaggcactcgtctcctgagataagactaaaacaccaagcaaaaccaagcaaaaccaagcaataaccaagcaatgacacaaaacattggcagaataagccccataggttgcgattatcgtcttcatatcaaccagaccttgtcaactgtgcctttggaagcgaaacgtccccgctacagatgttgatctctagtctcggacgtcgaatcccaaattgttgtctcaaatatcatgcatataccacggaatatatccaatcagacctgccaaacacaattggtgccttttccaccattgcagacgccggaaattatggttgcaatcataccactgtgattagctgtccccgcgtgtactacagagtatatattggagggaaattcccctgtcccagcagaatggccgggtatcattacagctttattgtctctcgggatgctggtacgtcaggtttgtgtcgctctggctattgtcgctcttgctggagctgtcccagcaccagtgaagcatgtcttgcacgagaagcgaagtgagcatgtggactgggtgaaaggcgagcgcattaagcgtgattccgttctgcctgtgcgtattggtcttgctcagaataatttggagaggggtgatgagtatctcatggctgtgtaagttgattttgtgtgtgtgggttcatcgtatgcgtccgatcactaatacttgtatagttccgacccggactctgccaaatatggacagtactggtctgcggaggaagtccatgaatttttcgctccttcaaaagattctgttgactctgttcgtcggtggcttcagtcctccgggatccatgagtcccggattgtacactccgataacaagggttggttggcttttgatgcctatgcacatgaagtggaggacttgttcaaggctgagttctatgaacatgagcatgccagcacttctagcatgaagattggctgcgaggagtgagtcttgttgctttctaacaactttgggcctttgactaacagcgttagatatcacgttcccgagaatatccaagcacacattgactatataactcctggagtcaagctcagtcccatcgtcaagaagaacaccaaggcaaagcggatgtcgcacttggctcattccaagggcacagtggaagccgataactctatcaaaaccacggttatatctgaaaaggcgcagtcacttcctgcggatctccagagatgcggaactgacatgactccggcctgcatcatggctttgtacgatatcccagacgccaccaaggcagcaaagggcaactcgcttggtctttacgagcagggtgactactttgccaagtcagatcttgatctctactacaaacactttgctccttggattcctcggggcacttatcccatccctgccttgattgatggagccagcttttcggtgcctgattatagcccgctgaatgctggtgaagcggatattgacattgacatggcgtaagtacaattccttttctttctagtcggatctctgtcctttgctaatgatgccagttattcgcttatctatccccagtctataactctttaccaggtcgatgaccagacttatgaaccggaagaggaaaagaccaccaatctgttcaacactttccttgacgctctcgatggtgtatgttatattcttccgaaaatcaaatgcattctgctaacgattcaagtcttactgcacatacagtgcgttcggcgaaacgggcaacaacccagatatcgatccagtctatcccaacccgcgtcctggtggctataaaggtaacataccattaccaccaaccagactaatcagatcgcttacacaaaacaggtgagcttcaatgcggtgtatacaagcccaccaccgtcatcagtgcctcctatggacaagccgaagccgatcttccaatcgcctacaccaagcgccaatgcaatgaatttatgaaactcggcctgcagggccattccatcctgttctcctctggagactacggcgtcgcctccttccacaacgacggagccgtcaacggttgtctgggacccgagggaaagatcttcaacccccaatacccctcgaactgcccctacgtgacctccgtcggaggcaccatgctctacgccgaccaaacagtcaaggatgcggagagcgtaatgtccgctaacttgggtggtgattccgcaaacttcaccagctccggcggtttctccaactacttcccgcagccttcgtaccagaagaaagccgtggagaagtacttccagaaggctaagctgacttacccgtactactctgagatggaagtcaatattaacaagacaaagggtctctacaaccgtattggtcgtggttatcctgatgtgtcggctaacggcgccgtgttccccgcttacaatggtggaaagcttacacactactacggggctagcctggcgtcacctttgttcgcttcggttctgaatttggtaagtcgaagcaaaactttgaattggtttgtttattgtgctaatggctctctttgcagatcaatgaggaacgtcttgaccagggcaaggggcctgttggttttgtgaaccccgtactttacgctcacccggaggtccttaatgatatcaccaatggaaccaatcttggatgtggctccgacggctttagtgctattccagggtgagtctgatcttctacattggctgtaggctttttactgacgtaccatgcagatgggatccggctaccggattgggcacacctaactatcccaagttgaaggagctgttcttgtctctgccttgatacaaataaggacagaggttgcaacagatttgcatacgagcgtcgatcaccttgctagatatcaatcatcaaattactctaagcccttatattgggatttcttcgtgattgtcattttcaaactgcccttcttgttatttttgattgatatctatgtctatatctaatatgagatggttttctggcgtgcttgggctagtaagtgtataatgaggtccttgagcagattgtttctccagttatctttcatctatatatgtatgttgtaaactaaggcggtaccaatcataaacggtatagggttttctacgtataaatagggataactagggactggacctaatttccttcgataaagtagactgactcccttcgtcctacagctctttacttctatctgttgggatcatcccgtgataagacaggtgtacactcactaaggcatcccatccctaagaattatacactcagtgaggtcatcaggttattgtttcatttttaggacaaagagagcaaacagaatatatatatattttcattctacctagccaggggtttttctttcgtgtctaactgactttagaagtgaagaaagcctccaactcctgcctgcattttggtcgactgcacgggttgccgcactcgttcaccaaatacagacatgtcatcatatgcatgattccagaacactagaaacagtataagttagtcctttttttcttctaataacaaagccagttagaagtcgtacagtctccaagtgttattgtgcgtgtttgtgccatagtgccccaagtatcagactagcgtcttagtccaccaggtagttagctagagccaatcgccagttttgtttgatccaattcctctcggttgtctctcagtttactcttatctattaatccgctctaatttactaccagttatgattggcttgggtcctttatggttgaaagtcgaggggaaaggtggccgccttcgaactcaacgccagggtggtccgtgcgcagggatctgtatagcttcaaatatctgtaaattagagatataaacttgcgaataggcccgtttctcgtcgccttagttatcaataggctgttaacatcatataaccatattaggcaggcaccgacgactgaattgccttcgaaaatgacattcaggcggtagcgtagaaaaggcaataaaaaagctgctgagggctcccgctcaggagctcgaccggagaaaagcatgtaaacaaaacctcgacctatctcaaccacaaacattcatgcaaatcctgaagcaccatggccatgtatccaattgaccttcctgtgagtcttatcctcgaaaattgaagctcagaagagtgattaacaagagtatacatatatagatcagcgatgctcccctcgagcgcgggatcagcccaggctcggcccccaccgacagctaccaactgttcctggcactctaccaccgcggcgagctctctctcagcgactaccgaagacgcctcggcttctccgcataccactgggccatcctcgtctgggatctcaagaacgaccgctggcacgcatacgacgtgaccgacggagcctctccagacccagtgcttcgacgcgacctcaacccggacttccaatggacctaccgcgtcaagaccaacatccatccggactcgtgtgactctctcctgatcagaatggcaatcggcgaagtccacgatggaatcggtcccgagacgatcaagatccttcttcagtctgttcagctgccgattaagggtgcttgtccgccgcagaactgcgtcaactggatcagggctgttcttcataagcttcgcttccacggctatgcccctgacctgcatgacattgagatgactattgatcgtgcgctggcttatgctgatcttcgtatggctgaccctgacaattcggcctatcttgtcgactaccttggcaatgaaatgtccttccgtacgaacatgtcttgagatgtctcgatgggatatgtcttgctgctggatcttgaagggatgtgttttgctggagtctggtgccaaggggtcatttgactatgaactgtttgttaacatggatgcgattaatggagcatgaattgattatctttgaagccatagggtggtctgtagatgttttgtattcatgttgacggtgccagacgatgtgacatggctatagatctatgactatatcacgtggcttttctatcatatgtcaatggagaagcaagtcttcacgggaacaaagaggccagagattggtcaaagcgccgatcttgccctggaatccatctcccggctttggcttgtatccgacagccgcttgctttttccattctgacgatctacacgcagcgctcattgcttgcagactgaggatgatcagagccacaatctatccattatttattagataactggctaactgggaggtacatgttagcagccaactcatcttggataggtattgaattcctgtgggcgcagccaggatccgcgacttccacgacacagactagggggaaaggcctcaaacaggatcatcatgagtcacaagctatcacaaaagtgtgatagtgaatcaacacggacgatttcatccgaccagccccgtagacatgtgccgcatagccaggaccgcaactaacctcgatctactccgtagtggagaatcagttacgagaaccggcaatgaagttccgggaccgagtcacgttcccctttttattttatttttcgcacgtgtcgatcatccgtgagcgatagcgataaaaccatgcgaataaagctagagctccaggctaacatgcattggcgttagggatgcacatcattggcataaagtgtgcacagtgcacgatccaccacacggaactcggatacggattttgactgaatttgcggatggatttaacgccgagagtcggaggaataatgtaatgttagccttgcgaggtacttttacctaaataggtatgaagcgttccaagatggtcaggtgggatggttttatccatagatgtttatgctggttattaatgtgaaatgaatagcataagctatgcatgaacatttatcagcctcagattacaccacgttgcctattttggatgaaatatgattaccaagtaattgattctcatccatgtatttcacaatctcagttcgtcatgcagtatgtggtcgttcacatcatcttgaccggctagacaattggtaatccatctataatccataattcattctagtagatctcaaacaggtctatctctcggccaacggtaacagatagcgaacggccgaagcccaagtcattgatgtcatacctgtcaagttacagtggatctcggaaaattagcaacgaaaggccgaggatccaatgtcggttattgggcgtttaataaggtggttgacaaccagccatggcgctgttggccgatgattattgtattattgtatccgatccccacagcatagaccctgaattcaattgttctggactgtggctggatctcgacctgttgactcatgatttcctgattgggttatcttcgtatcgtgttagaattgatggaagatggaagaaacattgaagattgcacgatagaacgtcttcgaatgtgcgagaaactgaaggattgaaataagccgcagagatgaaaaattgagacattccgtattcgcattctccatagggctacgaagtggagactagggtgtttcgaaacggcaagccatgcgagagcgaaccacctgcccacattttaactgcttagctcatctcggcgatatccgcaggggatcttacctaacacgccaagaaggccccggggcccaaggacatctgaaaaacaggacctcttggcttggagaaaagactgtgacgtatgccaaacacgctatcgtagtcaaggtatgcagtaaggactgtacatggtacctgtatcatgaagcgagaaacaactaatccaactcctccttgcagggcgcagtgtcaggctgtctctcactgttttgagcacatttcatgtgggcaccaatgagatctgccaatggcccaatgtgtgtcacctgtggaatgtacagcgtacaacgtcaattgtccgttgtaggcaacgctgtagaactgcgccatgagcaaatctttaagggaggaggcttatctagggatatcggaattatgctgcctcatggcctcatgaggatctgtgcatgctattcgttccccacagcactgcctactcatgcatggattcctggtcaatctctaattcctggggaatgctggtcaatcctgccaagactgggcagctgtcgtactcgttctagggagagtacaggcgaggggtagtgttgcataatactgaatacgcatacggaggctatgtggcttggcttctccaaggttccaagagcctccatgctgacaggccaattcattggttaatttggatacaacttacaacatagataggaggccgacacgttgacatgtcaaagcaattgtcagctatcatagctgttataaaagatgatgtgatttggcatgcggtgattggaaatcgaaatgctatgtaatccaaccttaggttccagggttcgataggaactttaagattgtatcagtaatcagactaaaccgttaaaggaaatggaattagggattaaggaaataaaataaataaaataaaaaagaaaatcaaaaatcaacggcaacaagtgcgaccgatactccgatcggttttttatcctccgatggattacggcacggcggattggtcatccgagtttctaagtgactcacgtatcttaattggatattttgaattgaataggagaatagtagagtagtagagtacagagtacatatgtacatatgtactattaatattgtaggcacctatataagtacctacgtatcttaggtacctagtaaagcacgacgtgtaacgtagcggtgaagatctagaaagaagggaaccttggaagcgaacagtgcattattcataattcgggctcggcgtataccctttctccatttatttccggtggatctctcatcatccgtaaagtccgtttcgggtcgatcggactaaaaaaaaaaaaatgaaaaatgaaaaatgaaaaaaacgctgccttgtcagattccaaggttagatataaacctctggtcctggaattgttatatctactttctatctcgttacactatcgatcttgtcccccttgaaaagaaaacttgatccatcttatactttcatacttttatgtataacaaagttgatctactccaaacttcttatcccttatatcacaccgccccacgacgatccactgtgactggatgacgcctaattgagtcaccaccaaaagagtcataataatccttcaaaagctcttctggcccaccatggactcttcttctatcacctctaatacctccaaaccctccccctactttgattctctcctccgtcgtcgccaacaaaagaaaatgagcattactcaaacatactacctcgcccacactgcccggaagaagctcactcgtgaagcttcccgggcagatcacgacttgcgcctgctcgttggccatgccaatctcctcgactcgctgatgtacgacctcgccgatgccgagcgtgaacaagaacgctggttcaaccagaccgtcagcggagccaccaaggcttctacttcttcctctcgtcaacacatccaatgggcttcgaccgtagtcgaagagcccgaggaggattgggatgcggaggatgcatccgatctggactccgaactcagcgacagcgacgactccgactacgacgagtcagaattcgtcatcaaccctcctccccgtcgccgcgccccatcacccgtggctcccttgcaggaggacctgctagaggaggaggacgacgacgacacagattcagactttgaatacgacgacgtggaggatctggaggagctgagcttgactcgctcaccatcgcgacagtcgccgcctgagctcctttctgattcagatggggagtccgaggacgaggcgacgccgccctccccgccccagcctacgctggaggcttttgatgaaaaggagcctgctactacggctattgccttggcgggctctgatcaaccccatctctttgagcaagggtattttggtgcacaagagcagacactcatcgaggcttattgattaagctcgatcactcatattcactttacgatcccgactatcctctacctgtctacctctctctctgccttgtgtgccatcatccagcgatatatacgtgataccctgatgcttttatgacgatatctttggagcgagtttatatttaccatctctcatcatctatttttctggcgtttttggatcggtcgcatttttcgaatatccattttggacattccattattttgatgtcatatggacatttattacatacccctctcatctctggctatccgtgatagcccaatattcagctctccctacaaaggtcgagactgcattggagtgttgaaacataggggaagacattgtgctcccaatgtactccgtacatacacgaaacaattatcttcaccccacagaaaacaatccaataaaaaattaaaatcaatactatatttccaatatttccaatatttcccactccactccatagtccagtaaatagttccattcaaaccggcagaatcgcgcatgtgaccctgtagatccccgagcgcagaatccgttcccagccaaatggaagtgcagctcgccagcacgcgatagtcttcaccgccggataagatagatagatcagagagatatgagatcatcgcggctaagtcggcatagggctagttaagagtcagctgaaggggtttactagtttcttctttagcatgtgttcggacactccgcggagagtgggttatggaaggggggggtgttttttttttttcgcttctttttgcttccaatggatgccttggctttgttcgatgtaaggtagggcgggatacatattgggctagtgaaaatcttgggggctgaggtgttttgggtatgcttgatgttgggcgatcttgacttccgttatgttattggttcggcgcttttggtttcttgcaagagatcatcccctggcattcattttccgttatctgacagtgtcagtttaccagtttacatactctgtatccgtgtccatacgagtataatcagcgtatgttgtactccgtattcagccctgaggctcctgagatatgaagttgactacgtgggtcctcttaaggtcttattgtggcttagtacggagtacatgtcgcggtagggtgcggagtatatgtactattacggagtatattactagtatccttcgaaaattgatgctatacatataactatatcattgatttggtattcctaatatcccatatagtatgttaaggttcttcctcttcaagcaaccttcgtttctgcacaatggcaaaaattatatcaatgccgtcgtagttcggactgtctagatcatcgaagcagctacattgcttggtttcaggtctcgtgaacaaatccattccttgcttcttcattagacgtaaatacatatttacttacccaagtgggaaggtaggcttccttcggtcttaacattcccatctgagtccagtacacaaagtgagacttcatatagcaaccataatgcattttaatagctttttcctcatgtggactcgacacaaatgaagctttccatatagggttgtgtcaatcaccccctgacattacataagcatagttaagctcagccgctatcgataagtgatcgccctgaaccatcctgacccctcgctgcatccgtccctctccagctcgagcaacatgcctcgtgaccatcaaccttcttagtttctattgcaacaatcctctcaaaacatgataccaaatccccgcttggtcctgtggaaccctcaacaaccccgtggccgctgatacgtactacctctcgtgctttatgtcaacacggcccacgaaaaccaacagactcattacacccctgttcattcgcatcatcgaagatcaacctcttaatgtctgcaccgacttctccaagagcctcatctgagtctgcagagcgacccgaatcaaaagatcaagatcatacgatcccacccgcggggtccggccacacccgcagcccttcgggtgaggctaagcccaaaagcaaacggagatcgatccaatttagcgtcggcgcggcagaggctcagctacccagtcgctcgttgagcttcaaggaaaagcgggtgtcatacgggggtaccccgacgagggaattattggaagaaaaggaacgggaacacaaagctaccgcattgaaccgagggccgtctccaccaccaccaaagtacgttctacttgaagattgtgtgtgaagcggcgtttattaattatataatagaacctacgagcgaggcgtctctttcgacacattcgacaactttgatgctaccgatttctccctcacattgaactacaaacacaaaggctaccagagcacacgtcgcagcaggacctttctgtgcggaaccgaccaaaacgactactccgagttcgccctcgaatggctcattgacgagctggtggatgacggggacgagatcgtctgtctgcgagcggtggagaaggactcacgcatagccagcgatgtcggaatcgaagagcgaaagtaccgcgaagaagcagaaaagctattcgagcaggtaatccagaagaacacccaggatgagaaggccatcagcttagttctggaacttgctgtgggcaaggttgagagcatcatccaacgcatggtaacatttccaagaaccccatcactatcttccaccaacctaacattcaccagatccgcatatacgagcctgcaatgctggtagtcggtacacgaggacgcaacctgaaaggagtgcacagtctgctcccgggctccgtctccaaatactgcctccagcaatcaccaatcccagtgatagtcgttcgaccctcaccaaagcgcgaaaagaagaagaaaaagcgccgagcagacccgacacggcgcagctacaaccatatcctggaaatgagcgagcagcgcggtagtcagatattcggcgccagcgccagcaacgatagcagctcctcgaagctgccagacgaagaggctgcagtcgcggaggcactcggactccccgcgtcatactcgaacgcggcctcgcgcagttctctgtcggtctctgaccgtagtagcattagccacgatgactccgactcggcttaccccattcggaactcactggatgcaatcgtcatggcgactccgagtccagcagatagctctcaggagagcgtcgttactggcgacggggctcagccatccccttcgctggatgggacggtggtctcgccatctccgtgtgaccaacccgactgccccgtctcagattcctctaccgaagttgacaacccggatgaggcaaacgaaccttccgatacaaccaagcatcccgtgtctatcccgatgattgaagtgtcagataacaatgataaaaaggacaacacgaagggatctgaatcctgaaagcatatggcttgtctggtccgcagcggcggtttaccttccatctttgcttttgctcgtgttgctccacacatacaccattgccctttctagcctactcacgatgcatacgaaccatccgatttcacacatgttctagcttctctctatcaaccagaataaacgtcgggaatcacgtcggtccgcgacgggactgatagttaaaccccagcccaataccctcatcacttattgtcctcagatatgttctgctctggttaaacattgcacatgttttggccatgtgtatctctccctcttgtgcctacagtgagaactcgctgaatgaacgcatagacattgattgcttagtctcctacagatgtgcagatctcctataacttttgtttactcgtagccattattcgcttttagtaggtacatcactacgaggatttgccaaagaagacattagaggtagccagaaggcgaagcattcattcaatcacgttaaagctgagtggtgctccgggtattgagaaaaggacaagaacagagaaaagcgaaaagcaagagagaaagagaggatatgcaaagaacgagaagggagaaagagcaaagagcaagatgaatatcagcaacccctcttcatcaccatcaatctctccatgccagtgcccacttccacagtagaaccccctactagatccgcaactgggaaaatggacgacaatatgaaatcgaagtgattcagcaagcccaattgcaaagccctactctcaaacacggctccacagcccatgtctcgattcaatgggaaaaagaaaaagaaacaataagaattgaaaaagatgtcaagattgtacactatgaatcgggtctcttcttcgaaaagaaaaagtagaaccagccgtgataaagtgaaaaaaaggaagtcctaggggataaccgaccagtcggaaaatgcaagaggactgtgaccgattaaaaacaaaggcgcgtggtgggctttcctcaagggaaaacatggaaatgacgaaaatgaagaaatctttttgtgaaccaagaaaatggaaaacgttgatcattaactcctaaggactttctatgctggggcttcgccgtccttgacagacggggtttttgagggacgacgctccgccgctgcgggctgcgacttggtgagcatcggggaagtggggtttgacggcggcgaggtggccaagttatcccgatcttcaagggcagcaagcgcgctggggagggtattagcattgggttttccgcatgaggaaagcgttgggggttgcgtacctgaaagcattcatagaagagttgtcttccttcttgctgccggtaggagtgccggtgcggctgctggaagcgctgtcgtcgctaccacggactaggctaccgccggggccgaggttcttgcggccgctgttggtgcgggagccgagaaggctggacggaccgaatgacatgggctggttggtgttgcgagtcgcacgaagacggcggagatcatcactgccaaccttgctagaggcgtagtcgggaggagggggctggtttccgtatccgaagccgcgggcgtcaccgcgacccatggggatgcggccaccgcctccgcggttgctggattggcgctggcgctcagcttcagctgcttgggcagcacgggcagcctgtttcgagagttagagatgagaaataatgaagcacagtgatcaggttactcacagcctcgcgaatctcaacgatggtttgaggacccttatcggcatccttcgagttccagcgtgcggcacgcagatcaataatatcctagaagtcatgtcagttcttttgttctcccttcacaagaccaagagctcgagagaaacttactagaagcatgaagcgaagacgactgggcaagttaggtgtctccatcatcatgtggatgcgaacgaagtaggcgtccatcatggcaggtcccttctctgaggcatcgagactggcaccgatggtgcgcagcagactggtcaaactctcgacctcggcttcatcggggacaccctcgtagtcgacaagtttcttgacacactcgtgcatgatacgctctgtaagcatgccaagcttgtacagttcaccaatgaacttgacgagaccaagaccacgacgcttagcggcggcagcgatgtagtactcatcagacatcattgcaatctgggatcgattattagtacgggagggaacatcaagttcatgtgtagatcgacatacctcttcagtagtaccctcgggcttagcaggcaggttagttttccagccacgctcgaactcttcttggcagcggttcagcaggtacttgcggaacagactgccaccagcaacaacggtgccatttctgtcacgaatattctcatccttgatttctgggctcatgctctccagcatgctcttacagaacttggcgtacataggggcccagtgagcctcatcagtagccttttcgaatgtgagttggatgacctggcgaagggtacgaccgtcggtctcgtccttggactgggagacaatcgcgaggatctgaccagagatacggtcgaagttctctggggtcatcttgttaagagcagccttgaccttgcgctgcacgacatccggtgccaagtaggcctcaccaccaggggcgggaccagcaccagcaccagcggcctgaccaacactgcgaggtttccagccagacgcggaggtttgaattgctttcaattccatgccagcggtaagaggcatcgacttgtttgccgcctcgtcctgacggccaccttgcttcttgggtcggctgtcggtacggggacccttgctcgagttgccacgaggaggaacaccggcggagtgttggcgaatgtttccaataggacccatgccaccagcaccccgtgggaatccgaagggggcggatgcattgcggctgcccatcggtccgccgcccatagggggtagctgaccaggtcggcctgtgaagttgcccatggggaaggcagtattcatggggccgctgcgagagccagcacggctgcccatgccgctaggagtgcgggcagactggggacgagaagtgtcggtgggatcaccaacggtgtcccgcagacgggcgtcccagtccacggagatcttatctttaaaggcggcctggaattgcagcaggaagttccggtcgtagtggaacttgcggccttcgggcgcagcagcgttcatagtggcgtcgggaggggtgatggaggcagggtaagtgacctttccgaggtcttccaagaatttcgcattctgcaaagacttcatgcctgcggtggcttgctggggttccgtgggcttgggagtatcaagcttgaggccagcaggtttcttgggaatagcactggcaggcttggctggcgggcccatgtcagacgaaacaggagtagcggcaccgctgtcgccaggagtggaagactcagtggcaccgtatccacccttcttgagcgcggcaaacgcgtccttggtatcgtcctggaccgcttccccaccggcacgagccttctcgcgggcaatctcgcgggcctcagcctcagcctcggccttcttcatgttcgcctcgtagttctccagttcctcgcgctccttgcgctcagcttcttccttcttagcctgctttgcgcggttgtagtcttcctcagcggcgcgctccttggcttcgatctcggccatttcgcgctcgatggcatcaaagtcgatctcatcgtcatcaacgggggcgggagccggagccggagccttcttgggctcttcagcaggggtagcagtctccttggattcttcagcagcctccaccttcttaggctcctcggccttatccttgatgctgagatcttcaattgcagcccgggcagcctcagtatcatccttcttggcatcggtcgaaacggcttcagtggtcttgcgggaggcctcatcagccagacgctgcttctgagcggcctcgtcctgctgaattttcaggcgaacagcgtccttcaattcctgcttcttctcctcgtcggtcttcgtggcattcgccttgctctcggtgcgagtgtgctcagacgcgctggcagtgcgagggggaggagtggatgtgggaggaggagtaaatttcacaggagaaggggtggcccgagcaggggacgcagggttcttttcgaaggtcttgactgagccgctgttagggtccttgatgataatcgggctcttcttggccgaaggaatgatgaagtgaggcttgggagcggggctgttagatgcgcgactgccagtgtgggtgtggctgggggcagcaggaccagtgggtgccggtccgtggccgaggctcgaacctgggcggtcagtagatacctgggagggggtacgcgaaagtggggtcgcctgaggcatggggttggggaattgctgtcccatgtactgagggttgtagggcatgccagcagcacgaggttggggcgacggtggtcccatgtagtaaccaccattcgggttgtaataaccagcgtagttgggatcgtatgcgttggggaatgactgttgaaatttaaccattgttagaaactgttcgaaatggccactttcaggcgcaagatccacggggtactcgggtgagtatggagggttgtctttgcgcctccaagagctgctaaggttcctttggggacgacgccacgaatcctgggaagaacgagaagggggggatctcacagcttgggggcccatgtgttgaccgtaaccgtaaggttgctgaggcatctgggggtgtgccatcggaacttggttcatctgaggagtggtagggttcacgttggccagcgcagggctacggttggcttggtgaggcgagttcgggtagggggccaaaggacggccctggttctggaactggggacccatgttaggaccgcctcgcggttggttgggggtctgtcggaaaccggggttgggagagtagggcatctgctgtccctggtagccgggctgagagtatccgcgaccgcgaccaccctggtagcctgagcgtccggggccgttgcccatgtggttactcatatcgctgtgggtggattgggaggactcgcgacgcaagtgctgggcaccgtgtgcaagagaagcctggatcgagcgcatctatgtgagcaaacaagttcaaaaaaaatcgagggacctggaaaagtcgcgcacaggtggtgccacgctccatacgcatctgcgcaccaagatcactcaagaaaggaaggattcgagacacttacgttggcatcaacagattccccaaaactaccgaagttcggcacatttccctgcgcctggtaagtcgatggagggggacggccgccgctggacgcgggctgggggataggcgaaggagaagtctgaggagacgtcacgcgggggttggtcgaaggggcaccaagtccagcctgggcctggttagaggcaggcacagcaggagcgcccatgttgggagaactctgctggaatccgaactgaagactgttggggcgactggccgggccaccgccgttgggcatgtagccggaggtaccgctcgaggtgatcgtcacagatggtttgcgagagtgatcggaggaagcggccgaagcagagggagctccattgacaatagtcacgccagaagaggccgcctgctgagattgattttgcatgggtttgccgttcacagatacggagctcgactgcccatgttgcgctgaaccgcccacggtgacgggtgcggcggtagagtccgtcgcggacttcttagttgcgttggcgtaagatctggctggcgcctgggtggcagccaggggggtagaggatgcgggctgggtcgaagcggcgggagtagcggtgctttgtccttggttgcccgactgaggagggttcgagctcattagacaggttgtacgtctaaacgcgcgaagagggcgatgggaaaggtaaggttcgagggaagagacaaaggtgatgtcagtacgcggaggcgtgacaaggccacatccaaacctaactgcggcttgttaaagggatgaaacgtgatggaaaaaagaggaaaactaatttccaaatacacagaagaccaggtacgcaagagcagcgttttggtcgacagtgttatgtgtttaaaagggttgtttcaaatggtagaaggttggtgggagggaaaaaattccagggaaaaaaaaatattcgggtttgtggaaaacgaaagggcagaacagagagttgcgtcccggggcgaccaacgtacctttgaatgtgttttatgggatggaatctcttgagactctctagaaagatgagatgaatgaaaattcaaaaaagtgaactgagagataaaatagtaaaaagaggtcgagagtgactatggcctacaacgccacccacatgttacaaagaaagctacatcagtacgtcgtagagtgtctataagttgtctatgagacaggctaaatgtacatcaaatgggttcgaatattaaacaatagatacccaagtacctaggtatgaccctattcgtataatatgaccgactattcctttttattcatctggaacctgatagacccagaatgttcccccaatgccccattttccccgtttgccactatagtgaccccatatatccaagatgtctacatctataccaccctatgaggtatataaggtctaccatatgtcatacctaggtagggattttcctatcttagctgcggccgcccgcttttacaacggcgctcagagccaggctcactgagtagatttcagtccgactcagtgagctgctcagatctattcacgtgactcaacaggtggtgtcctgaccatactttccccagaacccaaatgaacccatcaaactcgaagtgaccaaaataccttcacgatgagagacgagagagatatactagatctttacgcaaccgactaccaacctgtttgggctgcaggaattgaattccccggtgtcattccagaagagatatcacagtatctgtataaggatggcgagcaggtctccttgttcatcggaccgttgtcaagcctcttttggcttgagggggtggaagagctcgaagagctcattcgcgatcccgcatatgttcttacagatgagtaccgttcgatcccacagggttctccgcgtctttggattgtttcaatcttgtttgaagaagggaagataccagcaatattcatggacaagatctatgaagagcctgtccgacgccaggcttccgcgctttcttataccagctctattcccccaaatctcacaacaactcctactcaaaacaggattcaagatatcttcccctttgcgcgcctccaatcttttccgccaactatttcctgcattaagacaaaactaaagggaaagaagaacaaccgtgatgaaaattacgttgatttgatgaatacattcatcaattcacttggcggcaatcttctttacaagggcttatcacgctcgtcaacagtcagcctagcctcactcttcgcgcctctcgtctcctcaaacacgcttcagaacgggttcggacccggtttatacgctacttcctcactcaagtatgcgttggactatgcaggcccggatggggtcattttgattttcaaggatattgacttccgtccgttggttaagattgatttggccggcgaagactggcgaactacggtggactattggaccggggcgacgatttcagatgttactgagcgtgtaccagcactctgggagcgatccgatatcttgcaaggccaaatctccgtcaaagatctgaggtccaaacagagggttcccggaccagattcccaggttgtgggagtcagctatgcaggcttgaatgcatttgcatctgctttgcacatgatcatttggctagacagttcgcgctgagagaacttcgttgctttatgtcatcttgttttcaattgtctcgctaaatccgggctcttattcttatccaaggagcgggatcgtctctgtcgacccggcgtgcttgtggcttttgcttttgatattatttcctctattgctgttgcgtggaagcctatagttagctggtggactctattgctgttgcgtgaaagcctatagttagctggtggaaagataatgatattaataccaaacttccccatcttccgtccttgcagtgcatctgcgcgaactcttttatgcaaggctattcctccgaccggagggattcggcttgacatcctcggttgttttcagtattttgaactaacattttcaagttcgatttaaagtgttatttagcaaggccaaaaaaaaacccctcccctaggaacatagcagtcatcccattcccaatctctctcacccagcaagagcaaaatgttcaggttctattttggttttcttgttctactctaaaccacccctgttaaaagcggaacatctccgcgggactcaagatcggtcgtacccggttgcacgcgaccgggcaatctcatcgacagcccgtgccgcgaagtcagtaccagatgagcctgaagaatctcgctcgttgccaaaccaaccagatgcccatcccccactagtctttcgttcggggcgacgtcctagatcctcatcatcaacaacctcgaaggagttctcgctgcggttcttgcgcaacggcacgccgtaggcaaggtcatcagcctcgagcccaccccgagggctgctctgctcctcttgtgttagggttgaccggaggtgatctagcagctctcgctgcgaggaaataaagtgagccttctcggctccagacatggactgcatctggcgctgaagaagattgccactggctgaaagttcctgatcccgcgcttctcgagactttccagatgtgaccgagcccacagcggtactcagtacagaataccaatcgtttgtgttggcagacgccccaggtgctccggcggtggggatgttgaaccgcgatagtagcgactgcgcgtaggaagcggcacctggctgaggaggtgtcgtggggcgttgcgggggtagacccaagaccttctcccggatcaaatcgatagcttggtagaagtattgaagacccagtgccttggcccgctcatgagtgttgccgatcatctcttcgatctcccgctcatgatgtgtcaagaacgggtccacatagtcttggtacagtgtacgagccccttgcgtctgggggaggacgagataagccatgaaaccgaggcggatccagctgtagaatgggaacctgcatagttatcgagtcatgattagcttgcgatcatgtcgagcgaagcaagttgaactataccatccgatgataaacacagtccaggattcaaccagcagaatgactgaaagcaccacccagtacatcagccatggtgcgagttgtgaggggtcagaggaacggagagccttgtaggaagcgaaaacggggaagaggatcgtgatgaccgagctataggatagatctgcgttagcttgcgggcccattctgtccgtatatgacttgaacttacgacatcaagtccgcgaagattccaaacatgatgaagcctgggtgaattggagatgtgagaagaagaaaattccctggagattttttagttcttcagtcagccccgctgatctgagacgaactccgaagttggaacaaaaaaagaggagaacaaggcaacaaagatagttcaggggtatattacgactgaaagcagaaatcaaataatagaattagtagaaatagttctccttattccttacacataaatcactccacgataactcctatattaagagacgtgaccactcgcatttccccaagaatcaacggatgtgtgctgacgtcacgcgagacacctttttgcttcagtgcattgttaatgattcagtcattcatggatttaggacatatactatatataccttggatgtatgtctcgatatctgagatctttattttaggacttatgttcaaatgttgttatgttcaatatggtagaggtacaagcccgacaaggaacactttgctaactaatgagtggcccaatcacccgagatgccttaactacctaggtagttcctctctacgtattatgacccgttcctttttctcttcccatattccctttttctctagaacacttgcttctactccatcctatacatacccatcgttaaattcgtgaatcttggttattccccgctcgttcaactcgggggacctcggaaactcaaaccatgtgtatcgcattgatctcaactgcccacccggaatactcgttgatcataatcaacaacagagatgtaggtattcccattctgaccagtggaatcccaagcttaatatatctaggaattcctccatcgtcccacatcatcgccagactggtggccagagccatcctcacatgtcctaggctcacgagacctagcccgatctacacatggcacttggatgggggtcaccaagcatgggaaggtggcagttcttaccaattatcgcgaggactcgaccagcgcagccataggggtctacagccggggtgtcatcgtcaacagctggttgatcgggtctaccgataagcgagaggataccaaggagtttgtacaaggcatcgtggccagcccagaagcaaagcaggtggggggtttcagtctggtatgtggacatatcagcgagcccttggccattgtctccaaccgttccacagacatggatcagatcacttgggtggcaacggagaagaaccaaacgcgggggcttagcaacacaagctttgatgacagaacctggccaaagattattgatggagagcagttgatggaggcggctattgacgagcatgtgcaaaagggagatggggaagacgaggatgcattgattgatcgtctgctgcaggttctcagcacggatagtctgccacgactgtcagaagagaacaatacaattgaggagtacatccgtcatctgcacaagaccatctttgtccctcgcatcggtactccaaatgatcgtgatccagctgcagagaaaatcgctgcagctcaggtagaggatgaggccgacacacccacgaacggaccccctgaccagagttatacctgtggatcgtatggaacacagagacaaaccattctcttggcacaaccggatggacgggtgcgatattttgaaagaacgctgtatgacagtgatgcgaaggctgttcccatcgggcaaggcgatcattcatttgaattcatcatcacagagtagcttcttataagcttagtgaatacacttagacctcataacttgtttcgagaacttcagaccaaaacataccacttcacgtgacaacaagtcccttgatgcatccaatcacagctcgagaaagccattgacggaataggtaggcggtagctttctgccaaatcgagaggttatattgaactttaaggatcacatctcgcccttcggggcatatggtcaaatgaaaatatacagagaagattagcatggcccctgcactaaggatgacacgctcaatcaaagagaagctacctattttttttttcttttacagaccctttgttaaaattatagggtgagcttcaaataatactcagcttctttttattacgcttctgggaagtcacgtgagcacatgccggcgttcgaatcccgtgtgacgcgaactcaatttttaaatcccaaaacggcgagtgctactctcgatagtctcatcgatgccttctcgttttgtaacaaaaattaaaaggaaagatgggttaaatgaagcattaaggattactatttcatttacggatgtccccaagaacgagctaaggtatgtacattcctaaacgttgaccactttcagagattacgggacctatgctaacttactttttttcccacccttcccggccaaaattgagcgagatacggtgcgagagatttggtggtacaattcatttctatctggtattaggtcggagtacgaaacacgttgtcgacgaatccattttatattaacctcaacatatacacctgggcaaacatcccactgatttttgctcggtcagaacgccgcccttattctaccggcactgctagaaccatggacgaaatgtttatgttagcaagaatttactgctctgtttgtggtgcctacaatcactgcaaggacgcgccacgtctaccagtcagccaattaacagttggcgaggccttgaagcttacgaccactgtggaggaacattgtcatactatgacggatatatagcaaatccctgctgctgaagacaaactaggacttgtcaacgaagccgggttcaacactcataccattctctgaacaccagccatcgagcatataaggagtacagcaacaggcaaattatgaactacccagaggtgtcgctatacacgttcgcagtcgctttccttttatggtcaagccaaagaagtctgggtaaaacgttctgatacgagctgcttctgatataaattatgtttagagtaggaagtccgctccatgatctgtctgattttcatctggctactcgtcggcatcgcatacttattccccatttgcatgtctccaaagcgcaaatcctaactgaatccagatatcctgtatatccggtctccctaacatattatcttgaagcgaacgacatcaagcttggcgatggtagcgtttacaaaacatatcgcgacttttgcatcgctgcggtggtgagcatcttcggccctatcctcagctcgtatctggttgagatccattttctcggccgccgccgctcaattactttgatggcctgggggtgctccatttgcgcgggttctttcaccgccgtcgaaactgaggtccagagcctggccctctcatgtatgatcacttctacctgaatgccatgcacgcggttatctataggtgagtcaccgtagcaaccaattttgtttgcgaaattgactttggtctagatatatccccgaaatcatgcccgataagtatagggctgtcggatgcggcctgctgatggcctatggacgtgttggttcactgacggccccgtttgtagctacgcgggcaatgtgtattcttgtgtgcctatctttgtctgttgcgggcattttgtagttattggatttgtgtcgctggctttgccctttgagcctcgggatgtttccagtagtaggtgagatggcagctgctggcttagtattgacgtcaatcacgatttgcgcatagtacatgtcgaagatccccgagaaccaagtcgtaagagtgtgaagttataatgggcaggaaatctcctgtacactgctcgtccactctccgctccactctcattcgggctataaattatgttgtatgggactaatcagaaatgtggatactaggtaatccctacctcgatttcgatattatatgagcttagctcctcggctttacaggtttgcaaaggagtttccgagttcatttggcgaatttatccggaggatccaagggtgatcaagcccaaacgccacatggtgtttcatcttgagcatttctcatttcggccactacaccaagacgggttagccaattccacaagtgtatcaggacaatttaatttaaattgcacctttcttgacggtgagacttgtctacactagcgaaatggaaactgacctgccttttacgccgtttagtaatctcatctccacagacatcaggccatggagctaagcgttgccaatctccgacagatggggccgactatggataatgtcggtcctactccgtacggagtatacagttctgatccgcccttggtcactcgtgcttgaatcagtgacttttcagaatcggaccatttatccggatacttcggtggggagatccaccgtttagaagagacatctcctgcagccctcagggttagcgtttcccggtactccgtatcgcggtcataattaagccgaatgatgttccgagtggctctatgggagatcacaaacggtgaatcgaatccactctgttgactccgtccccgtatactaagcgctattcgacgcccctcggtgcagggtatggctatataatagacggcctccgcaggtttcactcttgctttgtgcaatacattcattctctttcattcaaacttcaagactggtctcttgattttcattccttttgtcctattccgtctcattctttatcgtcaaactcgacactcactctcttttacattacacaatgaagttcacaaacattgttctggctgctagcgccgccaccgtggcctgcgcatacccccgaggaagagacgctgtccctaacaagcagagcgctgatattaagaagcgtgcaaatggattcacctggctcggtgtgagcgagtccggtgccgaattcggcgagggcaacattcccggtaccctggaaaaagactacacctggcccaagacttcccagattcagatcttgagagatgccggtatgaacatcttccgtgtgcccttcttgatggagcgcctggtgccaaccaccatgaccggcaccccggatgccacttacatggccgcccttaagtctgtacgtaatatgcctgtcgtggttattgattacctcccaaggcctaacagttccattctatagactgtcaagttcattaccgacagtggtgcctatgccgtccttgatccccacaactacggaagatagtaagcgcatcaaaaaccacaactacccacctttattggtatgatgtatgatgctaatgctccatctacagcgctggcagcatcatcagctcgacctccgatttcaaggccttctggaagaccgttgctactgagttcgccaccaacgagaaggtcatcttcgacaccagtaagccagcacccattgtcaaactcacacgatcaaaccatccactaacacctccctagacaacgagtaccacgaccttgaccagaccctcgtcttggacctgaaccaggctgccattgacgctatccgtgccgctggcgccaccagccagtacatcttcgtcgaaggcaacgcctggagcggcgcctggtcctggaccgacaacaacgacaacctgaaggccctcacggactccgaggacaaggttgtctacgagatgcaccagtacctggacggtgacagctccggaacctccgagacctgcgtcagcagcaccatcggcaaggagcgtctccagtccgccaccgcctggttgcaggaaaacaacaagaagggcttcatcggcgagttcgccggcggcgtcaacagcgactgccaggctgccgtcgacggcatgctctcctacatgaccgagaacagcgacgtctggatgggcgccgagtggtgggccgccggtccctggtggggatcttacatgtacagcttggagccaagtgacggccctgcttactcgacctacctccccatcctcgagaagtacttcgttgacggcactgcctcggccccggcttcgtcttcttcctccgcccccacctctaccaagtctgctgcccagacatcgaccaccaccgccgctgtcgacgtcaccagcacccccagcagcaacgtccaggtccccagctccgtggttgagccgtccagctcggcctccgctcccgctgagacttccgcccctgtcgcccctgttgtccctactcccaccactgtcgcccccactaccctcgtcagcgccacctccacctccactgccaagcccaatgctcaggtacctaccaacagcccctctactggaaatgttgctaagcactactaccagtgcggtggtatcaactggactggccccactgtctgtgagactggcaccacctgcgtcaagcagaacccttactactaccagtgcgttgcttaagggatgatcttggatcaaaccaaaaaggggagattttattgacagagtggcttggtgtcagcgctttctttcttgatcgactgttttcttacactattcttatacattactttcttctcgattcacttcgattatatataaattcaatttcaatgttgcaaatactgcatgtatgcatgatgggtgacgcttctttctattcttgtgtagtcatagagacggtctcctgctgtcttccccaattatcttattctgatcttcccaatagggatgtaggaactgcttgatcatgcgcgctttgctcgtagactaagaccgaaaggagaaagttgacgttcgtcttcctgtggctaggcattgcctccaattgatgaaacatccgtagatgcccagtgcctaccacatattttcgatggatgtaaaccacatctcaagtgtgaaacttatatgaaattttcccctagccagagtaagtcaagataataccaagtgtattcataactaggtaggtaaacaagtcattctcatcataattataggcatataccccttagagtaactctgccgtggaaggaaaccgtcctagccgggaaaccctagccagaaacccaaagaaccgcagaaaacacaaccatcgccaaccacccctagaaacgaagcgagaaagaaaccgtccaggaacagatcaaaagacaaccagatcatcacaaccacctcaagcatcctcagcctggtgcaagcgcacagtaacaagatcagcaggcgcactagtcaaagtaagaccataacgaatcttctgatcaggataaacattctcaatctgatcaaagcgctgcaaaagcctaacaatgacatatccagcctcagtaagcgcaaactgctgcccaatacagatccgcggcccaccgttgaacggaatatactcccatccagcgcgacgactcgtccagcgctcaggcttgaactcgtcagcgtcaggaccccacaggtccttacgacgctgcatcacatgcgtcgtgtagatcactgactggcccttgcggatgtagacggggtcctggccgtctgggccgccgccgcgcgggatggtcgtgtcgcgggctgcgttgcggcggttgaaggggacgacggggtacagacggaggacttcgttcatcacgtgctgcaggtactggcaggactttagggtggcgaaggtgatgttctgggggttggagtaggtgccgaagttggagatgatagtttcgcggagtttggtgaagacgtctggatgccgggcgagcatgagggttgtccagctaaggagggaggctgttgtgtcgcggccggcgaggaggatgttgaggagttgggagcggagctcgattgggtcgcgggtgacttcgaggagggcttccaggaagacgtaggaggatttttcgttggcgggcttcttttcggattgggaggctgcgagggcgtttgacacgactttgtcgacgaaggagtggacttgcttgtcggagaacttggtttctttgttctcggcgaggaaggcgagtttctcgaagcggcttcgctgcgcgcagacccattgggacttgtcgaagtaggtggcgaaggagtcttcggatctgttcaggccgtttagggcgcccagctggctctcgacgctttcgccgaagaggaattctgtggcggagtcgatggtcaagcggaagaagatggattggatgtctgttgcggcggtccatccgttggctgcgacgggcagagcctgcatggccttttgcacgtgctcctcttccaattccaattgactgatctgctcgcgggtgaactgaggccgaagtaggccacgggatcggctccattcctctccatcggcggtgaactataaacagtcaatacctagattggagacatgatcaataaggtatagcatgtgactcacaataccagtgcccagcagcggatgcatgctgatttgccggacagaaccaagttcgaagtccttgaactgtgtagccaggacagcctggatgttcttggggtcgatagtgaagatgtgggtgcgaccgaggttgcggatagagaatgtagtgacatagcggttctcctggttactgatgatcttgacgcgctcctcggccaactcaggtaccagtttggccttgtctgccgccagggattgtttcaggttgtcgattccaaaaggatccttgcaagggtacattggcacgctgccacagcccagactcttagctttgcgcgagtgttgccatgagttgaataccatacggatgacctgcagcacgacggctgcggccgcaaagcccaagacgaatgacagagccatggtcctggttagatagtttggattttcagagtgcggacaggaaaacaagtggttttataagaatggagcgacctcggttgcaagcataagtggggaaaaacctccgtagcatgggaatgatcgtcacaaagctaagggtcaagagccaatcgcggaagaagtggatgtcatattcgatcggctgttcggatttcacactcgatgcaatttctgcacccatctgatctcggagctgttacttggtgtgtgtttagacccgagttcgcgtcggagtgaccgtgttggattcttgaccgtcttgtgaatgttccccctttctcacttcagttcctccgaatgtaccacccgacgtgcatcgtcagaggtcggtgtgttagaataaatcaacgggttgacatcagaatgtgcacaaggataatttcataatttcataaaatttcataatttcacaatttcccgttaggcaaatatctgtaaggccagtggggaatccctgttgcattagcgttgggcttggccgaggttatgaagatgagtgatcaattaattcaattgtaatcaacttcaacctcaatcccaacctcacctctgttctctccgataatctaaagaatattactatttcatctcagactgcagacccacaatggacatgctatcctcaaggtcctacctggaactggcacaagaagcagaaatatcgatggacaccttgtccagcgaattgacccatctaagacccccaaggggagcccaaccggagatccccgaccaactgaccgacaagcaatcggccccgggtcgtcccgtacggaaaagaggccgaccgaaattagaggctaaagatgccactgccatcgaggtagatcccgatcggcccctagaaatatgttgtacatattgaccagctccacaggaacgccgtctgcagatccgacgggcacaacgcacctaccgtcttaaaaaggagaataccatccagaccctcagatctcgcgtcaatgtactagagcagacactagagaatgtatcagatctcctcggcggagcccaccgcgacgcaatcaatcaactccacgacgatccaactcttcagccaagcgtggactatctcgctcgcacacgagagctcatcctagcagaaataaacaaggccagatcgacctctgaggacgacgatgatctccaactccagaccaacagtccatcgacagacaagcccacattcggctacgaagtgtcacacacctatcccccgaagcgggaatccaacatctcctcttcatacccacaatacacccgggcccgctccccatccccactaataaaccgcatcctcccaacaacaacaatctacacatacagccaccaagaatccaacctagcccgccgcctgcacagattcagcctcgagcacacctaccgctggctaacagacccgcgcaccgatccggccctgctaagccgcgtcttcggactagtcccctgcatccacgacatggcaggcataagacgtaatttccggcgcacgctgcggtccgagatcgggagcgggctggaattcatcaagatgcctttctacacgctcggcggtgcggggaagcacttcccgcccgtggacagcgacgggagccccgtgtacccggagaacagtcggagaccggggaagatcctgcggcggatggtgcggattttgcagcggggcgggatccaggattggaatgaggattggagtggggaccgggagcctgttgtggagggagtggtggatgggcaagtgcagatgagtgaggaggagaggattcggtcgctggatcttgatggcgaatggtttgattgccgtgatgtccagggatatctggaacatcggggtcttgtgcttgatgggtctggattgaggctcggtgtcccggagagcttggttggggctttgtatggcttttcgccggatcgatcgactgtttccagtctctatgcttcttccgatgggactcctcctgttactaagatggagtcggaaccctcgacctcgtatactctggatgttgagtgtttttttgatcgtgagttgaccgtcgatgacgtttgccccttgtgtttttgtcaatatcactgacttgagcctagtactcctcgcaaacctcaggatcctcggccgcgcgccaggattccgactatgggatgtagacgccgcactgcgatcagcgatctcccgtcgtccttttggctagccgaaccacaaagactgacagacctgtccttccatggatataatgactacttcacgagccacgaccagaatgaccatctaattatattcaaagcgatcaaaacacaagaatctgaaattgaactccattactggcattgttctggggtatagcgtagaaagatccagtatagcaaaaagaaagggaagtccatcaaatcaaatcacgtcaaatcgcatcacatgaaaacccgccaatatcacacggaaagacaatgaatcccgcgcaaggttccaagaattaacctcagcaagtccgccatcaacagtgtcggcatcggcagccacagcccgatctcatcggatcgtctagcagcaaatctcacagcactcgaagcaggcgataccggcgcaactgggataagttaattttctggaattccatcgcgcgcatgaccgaatatgtgtcttcgagtcggattgggagagggaacttacactccgcagcagataccaccgccgccaccaccgcgcagctgcatttgttcttggttggcctgatgccgatagaagttaattttcgttctcgacatatgagttttatttatgggttagggtgcacataccggctgttcagtgacgacgttctggttagttgaaggggcagcggggctggtgggctgcatggtgacggtgttggcgttccagttttcagtgggctcgttggccggggtagacttgaagaagttgaagttgaacattgtggtagtagtggtagtggtagtatgtgtatatggtacaagggtggaaacagtctaaggtgtaggataagaggtatagagaacgaagaaaagtgaagaaagaggaaaacagaaaggaggaaaggacgctatatgtagttttccaatagtttcgacgatcggctggaaaataagtccaaagtcaaatgaaacaactagcgcccgacaaaagagattaaacgcttacacattccaatactcccgaggtccgtactccgtagggcttatgcaagtcagatggggtacgagtacggagtacggagtgttgctaagtttagctggacaaatcagaatgatgctgcctggtaccaggaaccacactgaggctttgcagtatagggctatattctccagttttctctataattacctgtagaactgtggctatgttcgggtattgtaggcagatagaatatgaattgcacagcctcttcagagcttgttctctatcgaaaagccaagtaggtaaaaagcaatcagcccttcagccttgtgggcagtcgccaagacctgcagggcttggcaaacagcttatgtattgcttgtattggggtaatggtattgtaacacatttcaagatgaacctcacttgcactgactgtatggtctatatcattgatattatgtatgtacatgtagacgtgcattgaaggaactcggaaatagtcaaatatccctcacagcttcgacagaatcccatccggtcgcaaaacagaaaggtaacaactttgaatttcgctgatcgttcggcacctgcttccgattagcgtcctttttctttttcttttttcttttcttttttcgcattccagaacaatggaattctcaacttacccagccaatgccatggtgatccgcagttcttggcggaggatcttaatcgccagttccacaccttcttgtccgttgtactgtatttggtcagtaaacagcataaccaacagaaggaaacacatacagccaacccccagaacgggattcttccgataaagcagaagctagcccccaaagccagagccttgaagatatccgagcctcgtcgaatacctccatccaccgcgatcgggatccgacccttggctactggggcacagacccgcagtgcatccaatgtcgacggcatgccgtccagttgccggcctccgtggttcgaaatgacgatgccgtcgatgccgtatttgatcgcgagttctatatcttcgggggtagttactgtatcatcgattgttagccgaactgtgacctgctttacttgagtcactcaacaacacaaacataccacccttaagccagatcttcagagacgtatgttgtctcaaccaaggaattgtttcttcccagtccaaactggggtctttaaaacatcagcatgttctccacaacctcacatcaacttcaaatcagctccaccgtacataccgtagtcagtgcggtccgagtgatccgccccgtgactgaggatattcggccacgacatatcatccggaatggtatactcattccggtattcgttgatgcgcttgcctagcacgggtacatcaacagataggaacagcgccttgtacccagcctctgaaaaaggatgttagccccgcccagccaatgaagccatacaaaaaaaccattcagatacgacatactctcggctcgctctaacaactgaagcgtaatcgaccgatcccgcagtacacacatctgcatcacatacggattcccagtcccctgtgcggcaacttcctcgagcggataattcgagtacgaggacagacccatggcaaggccgaattttgcagctgcccgcgaggtcgcgagctcgccatctgggtgggcaagtttcattgatgcggcgggactgaagccgaatgggagcgagacctgttatttgagtgttagggttggccactgcgttcgtttatttcgggaaagtggaaagagcaaataccttgctaccgaggaattcggcgcttgtgtcgatcttgtcgacgttgattaagacccgaggacggatcttgtagcggtcgtaggctgtttcgttctcgttgaggctagacagatgttagggaagtggggcagtcattgcgttttgatattccatacgtgattagatccatagctcctccattgtagtagtctatcgaggtcagcactgacgcaatgaaccgttgctgtgaagtgatgacactcacctcggaccatcggagccagccgactactccccattttcttcaggtcagcaatgcagcatacatctttgtgaagggtctctccgcggtgagccattgtgccgtttgcgttgggatgtgattatagaaattgtataggaaaaatggatagagtgaggcgacgatggcacagttcaaataagaaggatccccggcgacctctcctcttccgagatcattttccattgccggattgagttgcgcacaagtagctcctcgctgctatagattggtttctggggttggtttccgattgtggaagacgatcatcggagtcccttgccagactgagattccatccacgggtggatggtgtcaccttaccaaagcactatttacaacatatacaaatatagcgccagcgccggtcatacaagagcaaggatattgtgcgtggtctagccaaacatgctgggtccaagcctcgcaagaaaaggtttccacgaaaagagaatcagagttgttcatgcggctcaggatactgtgttctagatatctggggtgagcgtcgtgtcagtattgattacggccaatagcctcttaggtcttcgttctcaatggtggtaatgaagtgcacgacattatctacattaactactgggccaaatgggctgttggcggcttcatttccagccggcccaaatctgcttttttgtcccacttatgatccatggcaaacagaggggcgatcttagtcggtttggaatggaattgctgttaaaagacgaaaggaaaagagattggaagagcaggtgattccgaggagataagctgataagagatcccatatccaagattagaaggcagttccgagtgtggcggggttagctatgacttcgacgttccctttccaatatggaaatggaatcagcaagaagctcctttttagattgaatatatcagactatatgaaatggcggcatctaagcgatcaagacctcgccgatcccatgcgctgggaggatgcagcacctgcagacgccggcatgtgaaatgcgatcagaaacggcccgtgtgtcgcacctgtcgggccctagacgtgaaatgcgagggatattccgatcaggtcttgtggatgcacactgataacggcgaggagactgagagtgctcgtgggactcgccggtatctttattcgggtacgtggccctgacagtacgagacgaactggacttggtattaacccgtgtgctagagcaatccagactttctatgagcactgcgcttgggtctgatcttgtatctggatctattgatgcatcactggcagaggttgactcgagactgcgggaccctgaacgttcgctcgatggtgatattgtcattggaccctttgcggttctcgatttctctccagcgccacggaagctagaacaagaactggtgcccgaaattgaacctgtcgcgtctgatataagttctgcagcggagccgcctgagactgtggctcctgagaatctgcaagagtctaatccctctccaatacttgattcactgtctcagatcgatgacttcctccattggtctgatctattgagctttggtctagacaatacggagtttacaacaagcggcgtcttgagtatgtcgaatgatttatctttcgatatgagtcaagagatggggttgctacccgtcgactcaaatcacaacgatgatctactgcaaactttcacaacacaacaggcaccagcagagcttatttcagcggatgtagatgcattgcaggaggccccgtttctgcttaagcacttccaggatactgtggtcccacacataatggccattccctgtcgccagaaatcgccttggaagatcttgaacgtgccggcggcggtaattacatacagtgactcgacttttcttgggacagaaaaggtcagtcaggccagacttgcaaatatgtacggcttgcttgcctgctctgctattcatcttgttttgaacccttcaacaatatcgacaaagccgcctgagtattggtggaaggttgccaaccaggcatacctgcaagctaaggatcatatgcaaacgtctttgcagtcagaaacacagggtttaaagaaagcgaaatataaagaccagctgatggctgcatgcattctcatacagtacacggtgagtttcctatttggcatcgattgaatgactctgactcccacagatcatgtccggtcaacaacaacacgcccgatgtttcatgattgatgcagagcgattattacgccttcgaggactttcaaaaacccgaatatcgaaaaaggcacgacttttgcatcacgtatacacctggttaagaatcgtcggcgagagcacatttgttctacatgactacaacctctctgcctcctccctggaagcacttggttctcgatttcgattacaacacactccgaactcagaacagatgacgaacgctgagccaaaccctcggctggatgatttcctccgcctcgaaacacaaaactcggatagtgacctcaatatcgatgaacccaaggacaaaacttcaggactccacgacatacatcttcaggactcacgcagttaccctgaaacattatacaaacagatttatggcatcccagaaacctggcttggccttgtctcgcagaccacaagactagccaacgtcttggagacattccgtattgcccgcgaggcgggtcagaccatgaaccttgaagcgtgggagacactacagcgacgtagcactcgtctggaaaatatgatctgctctttcagcctgggccgaacaagagccggagtcctggagctccatgccgactcaaaaccgcacggtcatatggtggaggccttgaatgcagctctagtaattttcttttataggcgaatccggaagatccaccccgccgctctgcagggtcatgttgatagtgttattgcagcgcttcaggcgtgcagtgcaacgctgacccaagatgatcccaccggacccggaacggcgtggccgttgttcattgcaggatgtgaggcaatgtcaaccgcaagacgaggggctgttatgagcatgttagatagggcgagctcaatatgcgggtttgccgcttttggaacagccagaaatattatcactgaagtgtggcgcaagcaggacgagcatttgactgcgaaccggggtgaatcgatgccatcgtgggtcgatgttgtgaagcaaggacagatatggcccttgttttgttaacatagctggttactctcgtcttgactatatcttacgattcgtactatgcacttttatgacgcgatgaatatggtcccaatgttgtatattctataaactatgtacatggatagtacgtgtcgcattctcattccgacattcaagcattccaaatcatcaaatgaacaaatgaacaaagatctaaacagtcttaacaccagcattctgcagcaattgcttaagctccgccgtcaactccgggttgagaagagcgaaaggcttgcgcaagccaccagtgggctggccaatcaactcaacaccagtcttaacagcagcagcatagttatgcgactcaaggaacttgcaaatggggaaagccttagcccaaatctcacgaccacgcttcaaatcccccttaacagaaaccgcctcataaagctcaacggccaactcaggaataatattcgccgcaccccagacaccaccgggagcgccagcagcaagaccatagaaagtcaaagtatcccacccattaaacgaggtaatctgatccgacagagaaaagataagctccgtcagggccggcgcattaccagaggtatccttcagatacttgacaccgaccttagacagaccggcgatctcagtgggagacagggtaatacccgacgcagaaggaatattatagaagacaatgggcagaccggaggccgtgtggatttcgttgagcaactcgtgcagctgctccaggttgacagggtcgtagaaagggggcacgaccattgtggctgcggcgccggctttggcggcgtgtacggagagctcgacggcctcggcggatgagagactgcctgtgccggcgacgacggggacgcggccagcggcgaacttaacgcacagctctgttagctgcttgcgctcggcgaaggtcattgtggtgaattcgcctgtgctgccgcctggaacgagaccgtgtacgcctgctttgatcaggtgctcgatgtgtgcttgcagacggccttcatcgatggcggtcttgtcgtctgtgaagggggtgatcagggccaccatgatcccgtaaagggggtccatgttggaggttggatgtaagtataggaagtgagaggaaatatgttttggtttggaaatatggtgagtacggcggggttggaggaagtggtgatctagatatagttggtttgattatggaatctcttaccatttctatattttctagattcatgattctatatctacttcggactgtagaggagtgacttgccgtatcgggacaggcttcctatttaggatgtgtcccaccatcggattgaggcttctttctcttctgggagtttcttctattcgagttctaggttctttcaattgttctgcttcgtgaagattaaagcgataatatcgcagttgtttaggatttggaaggcttgctggcacgcatgacatgcagatcgtgctatgcagggattccgcaatagccacacagtggatcgggatgtcaccgatggcttcgcatgtggactgtgcttccgactagccaaggatatatcccgaaatgaactatctgcggggtctaaataaggccgttgaacgtcattgtatattgtgtctccgacattggtagtaccgtaactgtcaattggcgttgagcttcgaaactagtttgtcgtctttttatcagagctgtgtcaacttcgcatatgtaacatattccattattgcaataaatacgtttagccagaacctgagaggatctcgaaaatatatatccgatgacatgttagggctgagaacatggctgatcgaaaaagatcaagaaagcaccttaatccgacataagagtccggcatatctattgatcgaataattggaaataagccgatggtattaatattaggataattgagaataattccatctactccatattttgccgcagaaaatatccctaacatcgcggagagtatatcggaaggacttgcctgaaggggcttaacctcgctgggagtgatatcctatatcataccccacgcggcgtgaaggagttggtactgttcagacttctattatacccaagaacgaaatcgaaatggacctcttcgttgatatcgtcacccccaatgggcacagctacaagcagcccaccggcctcttcatcaacaacgagattgtacctgccacaggaggccagaccatcacatctcttgaccccgcgtgcgtgattatcggaatttctctgtacacctcactaactattgtctagtaccgacaagcccattgccaccgtccaagcagcgagcgccgaagatgtcgaccacgccgtgaaggctgccaaagcggccctggtccacccctcatggaagttgcttcccgcgacagagcggggccagttgatggcccgactcgccgatctcatggaggagaacagagcgctgtttgcttctattgaagcttgggataacggtatgtatggaaatcccccaaactggagacaatttacttatcgaaggcaggaaaaccctaccacgtcgcccttgacgaagatctcactgaggcaatcacaacaattcgctattacagtggctgggctgataagacctttggccaaaccatcaatacaactccccaaaagttcgcctatacaatccgccagcccattggcgtagttggacagaaattccatggaactaccccctttcaatggccacctggaagcttggccctgcacttgcatgtggaaacacagttgtcctgaagccagccgagcagacccctctcagcgctctcattctcggcaccttgatcaagaaggccgggttccctccaggtgtggtgaacatccttaatggctacgggcgcgaggctggcgccacgctcgcttcgcacccattaatcgataaggtcgctttcacagggtcaacggcgaccgcccgggagattatgaagatggccgccggcacactcaagaatatcactctcgaaacaggcggcaagtccccattgctagtttttccggatgcagatatggaccaagcagtcaagtggtcgcatggcggtatcatgtccaacaaaggcgagatctgtaccgcgacctcgcgaatcttcgtccaccgcgatatccttgaatcattcactgctagctacaaggcggcagtggagggtgcaaagatcggcgaccagtgggacgagtcggtcttccacggcccgcaggtgacacgcgcgcaatacgaccgaatcctctcctactttgaaattgccaaaaacgaaggagctactatcctcactggtggcgctccctacacgccgactgacgagaagaataagaatgggtacttcattcaaccaaccgttattgtcaatgcaacggattctatgcgcattgcccgcgaagaagtgtttggtcccgtcgtggtgatcttccccttcgacgatgaggaagaagctattcgtcgggccaacgataccacttacggcctgggtgcggctgtcttcacgcgtgatctggagagcgctcaccgcgtggctgctgagatagagtccggtatggtctggattaacagcagccaagactgtgacccgcgtattccttttggtggtgtgaagcagagtggcattggacgtgagttgggtgaggcaggtctggaggcttatagccagattaaggcggttcatgtgaacatgggcaccaggctgtaaatgggcatatgaagtacattgcacaatatgaatgtagattttggcaagctaagcatcttctttacttcttatatatagaaaggccatgttttaatgtttcaggttagcgcctgatttttcagcctcctgcttacttgtggggtgaaggcttctccttcttcccctctcttttctcctctcaagttttctgttagcttacaatactgggttactgcgcttccttttctctgtttccttcttcctgtttccttcttcctgtttcctgtcgatgacttaccagtaagcgcccagcacaaaggaggggtaagccctccagccaaagaaataaatcatgggtctcaacagtcttgtgtcaagactgaaacgccgcacacgtgcggaagatactatcagccagtcagatccaatatccgaaagcaatggcaaagcgattctctcgtcttcaacccccgaagacacagaggtcaaccttccaccgcaaaaaccagcaaccgatgggcgtgacttgtggcttgaagcatttgagaaattgcctcgcaattcgcaagaagaacttgaaaggcgaggcatgaaccgacaaggctctgagagtatggtcaatcaagtcaaaaaatttcagaaagaggccgaaacacagcgggatagaagcttcactaaagattggaaggtccaaataggaggccacgatatcccagtgagacaaacaaccctccagatcgttaactgggccgagaaaattggggacgtagccatccaatttgcgccggctcctggagctggaggggtgtgggctgtggcaagatcagtcctcgaggtcggttctctatatcggaggatacaaggcgctgcttacacagtatggaattcagggaatcgatactttcgacaaagaaaagagcgccctactttctgttgttgacaaagtggcgggtgccatcttctccggccaggtctactacgagatatacaaccccgagcggacggggagaaaggatgtcgtggatagactttacaatgcaatcgtgacgttgtatgggtgtgtgttgcagctactggtcacatcgtctgatctttcatctaacaccgccgtgcaattttgccaggctgtttttgacactgcgaagccgtctggaatgttgctagaattggaaagattggaacaagagcttgcaacagcggctggtaagtgtgaagagacggctcacgctcaccaagaagttattttcaaggactatctccaagaagctgagaagtccctcaaaagaatcactcgtcatatggaacatgtcttcctatgggtggataaccaagaacggagggaccttcttgaatggatctcggatgtccagtatggccgtcatcacgatgagattgaagaaagaagggagcctggtactggtgattggcttgttcaagatgagagattccgtgactggatggattcatccttgtccagtaccctgtggcttcgaggatctcgtgagcctgctcaatcctcgaaatcaattatttctctgacaaaagctagctggcacgggaaaatcatttctgacttcagctgtggtcaagcatatcgaggacacgaagggaccccaaatggaaggatttggctatttcttctgcaatcaagacgagaaagatcggcgggaggcactaccagtgcttcgaagcttagttcgccagttcgctgccccaaaaggcagtaccgaatcggtaaggagaagccttcaagatgcacgggaaagagcaaccaatagagcatcacaactcagctcctcggaatgctgtcgtcagctcgtggaagcattcaatctatattcaacgagtgttatcattcttgatgccttggatgaagtcttggacgatgaacttgatattttggtcgaggctcttgaggatgccattgctgagactaaagacagaggcagagtcaagctctttgttgccagccgacccgagaaaagcattggcgcgaaatatggctcaagttcaacggtcataatccaggctcaggacaacgaaaaggacattgagaaatttgtgactaaggagatggataaatttgagaagaagtatcccaactcggaacttgccgctatgaaggacactgttgtccgagctattctcgagaaatgcgacaacatgtaagaccccatgactatgacgagcgaacaagctatatactaacgaagaaaacaggttcctgtgggccgccctccaggtaaagcaaattgtacaatgcgacaccattgaatcaatcgattacgcactggaaaccctcccgaaggggctggatgggatgtatgaccaaatatatcggaaaatccaaacccgatttccgccggaacaagccatagcagaacgcacgttcaagtgggtgctgtgctctccttacccgctcacaagtgaagaactcctctccgccgctcgcatggccattgagaaagacgacataaagttggcgagttgtgtgcagcaagagttcttgctctcaatttgtgagaacttgctcatggttgacacctacggtcgatggaggtttttccacctttcagcgagggagtacctcgagaaggcccttgggatatatcaaaaagcacactcttactgtgcccaggtgtgccttctgtctcttatgcgaacatttggcccaaaaacactccgtggaagctccgaggatccattcaatgaaacacatcctttctcttaccatgctcagacttggtgggctttttacgctcatgagcagccgcagcctgaggaagatcaatctgtcattctgctaaagaaattcattggctcacccaacaaaagtagcgccttttatattcgatggttggatcacattaaaaagcacagtctttcattccaatggccatcccgggcagggccatttatgtctcatgaagacctggcaccctctacgacaccaatgtttgctatagctcagtttttattgtatgaaacgactcttcgcaaatggtgcgacagcaatgattttgacccatttcaacaaaatgaccgtggcgaagctttgctcacgatagctgccacgactaattgcatacctttgtgcgcaactcttattgcaaaaggagttcccgtcaaccagtgcaatgccaatggcaagtatggaagcgtgctcgcagccgcagccaactgcggtagactggacacggtcaaataccttgtgcaggaggcaaaagcagacgtgaatctcccaccccagagcggggattacggcagtgcactaaatgccgccgtatttaatggaagcttggatatcgtgaagtattttgcagaggaggtcccggatgtgaatcttctagttcatgtggaaatccacggcaatgtgcttgccgccgctgcctactctggtaaactggatattgtgagataccttgtggaggaagcaaacatcgaggtgaatctcccgcctggcgagggccaggttttcggtagtgtgctttgtgccgctgcctggggaactcttgacatagtgaaatatctggtggaggaggcaaaagcagttgtgaatataccgagtgcggctggcaatggccttgttgccgctgtcttgtgtgggaatctggatattgtgcgatatcttgtggaagaggcgaaagcagatgtagatcttctgcgtgatgatgagtttcttagtatggcacttgagcaccatacaaaagaggatgctgttgcggtcaggcatattctgaagttacccagtgatcaagggacaggagatgagcactaaagcactgaaataggaatcatatatcaacggtactacagggtctacatatgtacgtatgaatgtcggggggtctcgtcttatattcgcactttatcaactttatcagacacctgcactgtacttaaactgcgtatcatgtattactctacgaatggcgttcatacgtatattattgaagacccaagacagattattagctatttattacttgtcatgtatttaatatccagttcgatacccctactcggcatatattgctagcgatggacatcctgcactatgtcatctatatattcattttatggccatttcaccgtatccagaaattgttttacctgcgccagatcggctaacgatgtctgatgcatctcgtgtttggcgattgtcatcgagcggtgggttctaccgagcaatgcttgccgatgataattactcttctgagaccacaggctcgaagctttatacgtatcgtacccgcgatatgtacgtgaagctttacagcgcatgctctccgcttcaaggcaatatctgagcggggtaagcagagtcaaagtcttcaaatccactcggtggagctataggtccccgggataggtccccggggattacctgcatatgtaggtatcctacctaggaaacacagcgcagggtagacagcaggctattggtcgccgggtccgttataaatcaggtcaattatgtagagtaattcaagaaaggataaaagccggcttccttcctgaagcgactttaccaaactatccgatcgaacgggttaccaagtctctttgatgtaaactatgactgctcctgtcgaaagaagagttcgtgtcgcagcgattcaggcagagcctgtctggaatgatctgcaaggtggtgttaacaaggtgatctccctcctgggtgatgttggaaaggaaggcgccaatgttgttggattccctgaggtttttattcccggctacccgtggtaagctcttcatctccaaaaagaatgaagatggtccctaaggtggtgttaggagtattttcactgcaaccccgttggacaacgccccctttatggaggagtacttccataattcgttggctgtcgactcggacgagatgcgccgtatccaggctgcggtcaaagaaaatgggacattttgtgttcttggattcagtgaacgttaccagggctcactttacatttcccaggtcagaaacatcccggtctatagatgtcttgatctgaccaagctgactggttgaattcaataggtcttcatcaacactgatggacagattgtccaccatcggcgcaagaccaagccaacccatgtagagagagcgtactggggtaccggcgagggtgactcattgaaatgtgtcgtcgactcgccgttcggaagaattggaggactcaattgttgggagcacacacaaccgctgcttagatactatgagtatcagcaggatgtcgacattcatgttgcgtcgtggccggtcctctgggataggccggaatctgtcggctcgcggtggccctattttatcacaggtgatatgagctccaggctatctcaggtcatggcattcgaaggtacatgctttgtccttgtctgcacccaagtgatgtctgaggagaactttgacaagaacaaggtaagagacgtagaacatatccagggtactgggggaggtttctcggccatatttggcccggggggagagcctattgctaccatgccatccgataaagaaggaatcctgtacgccaatgtcgatgtcaacgacaaacttcgagctaagcaatggcttgatgttgttggacactactccagacccgacctgttgagtttgcgtgtcaacactcacccctccaagccggtattcttcgcagaggagccagagaaatagacggggagatgtatggactttttgtctgtggcaagataggagaggaaaggggaaggccaatacaacactgaatcacttgcctaacacaacatgaactcttttcccatttttttgtcttcctttcctttactgttctcttgtaaattggccccaaaaagaatggattcgaaggtcgctgtcgctagcatgagtcattatgagtatacgcggactggcctcggtgaccctcaaaaccaacaatcatgggtaattatcactctccaactatcgttcatgactcgaaattggtaagaaagaatagacatcttcatttattcctaggacactatattaagaccgtggtagacaatcatgtcctctcttcatcgaaagactaagcaaatcgccattccaaggtttccaacatcccacatattctttccagtcgaatcaaaaagaaacatgtcatcgaaatatgcgcctgcgtgggatgaggtaaatcaagtctaaccacagaataataacaaatgctgaccttgacaagttcgtccaagaaatcggaccactgctcatgacaggctccacggtcgaggacttgtatagagattccgaggtcaacatacaaaagatcatatccaaatacgaaatcccgccaccggatgattctgtcaaaaccgaagacatcaaacttaaagatgcctgggtccgagtcttcacatccccatcagcaaccggcaacgaaccagtaggcctgttcatgcacggcggtggatggatcatgggaagcgttgaccacgaagatgccgcatgccgacttatcagcaaaagcgccggcatgaaagtcgtcagtattggatacagactcgcaccaaaattcaaattcccccacggtctcaatgactgtgtcgaggcagcattgtggacactcgagaactactcgctttcatccgttgtgctcatgggaggttcggcaggcgccaaccttgcttttggtgtcgcactaagactcatcgatgccgggcttggagataaagtcagaggtatcgtggctctggttccttgcactgtgcacccggatgcagtaccggaagacaagaaggagtactttactgctcatcaggaaaacgctatccgtactgttaacacatcggctgcgatgaaatgtttcctggattcctatgctccaccacctgctgataaatatttctctgttctcctgcacccgcgcttgaaggatctgaagaaggtctatattgtggaatgtgggacggatacactgagggatgatgctcgactgatgaaaggggctctggaggaggctggtgtacccattatgtatgatgattatcccgggtatccccattatttctggtcatatccttctccggctctggcgaaggcttcggaggagtttcacacgaacatgttccgtgcgatcaaatggatcaacatggagtgaaagtactgtggacatactacattacatgagaggaatgagcaggcctcaggctgcaaggccaacacatgtcattggaagccactggctacttcgataatatatatgtgctacctcctcaaaatatccaactgagcatactctacgaataactagccgacgtctaagtctgttcggccgaagaacgctcccaaaaaagtaagcggcaaccccccgcatgtgaaagtacttagtctccggcacttcacatcctgcaattatcagccccctaaactgttagcttaacatgtcgtgcccgaattgtttcagcggtcatatccaccaagggactccccgtggggaagtcacctctctccatggcatgcaagcctacacgaccaaacctctcaacgatgtacctcaccggggcattatcatcatagtgcctgatgccttcggctgggagttcgtgaacaatcgaattctggctgacaactacgccgaaaaggggaagtacctggtttatctacccgacttcatgaacggtatgttctagtgtctcccaagacccccaagaatgactcgctaagcgtgatattagggcactcggcccctatcagtatgatgtctgcgacaaaagagttgttgaagacgagcggactgacaacctggcttatgaagccgtaagtcgtccaattaaaccaacacaccggatcacacttgtataaaaaggccactaattcgagctatagataccatctagcctcaatgctgacaagaatgctgcccttcatgtactacaatacgttcggggtatcatggccgatcgtccgggacttcttcaagtccgtgcgcgagaacgaaggtgccgaccttcctatctacggggctggtttctgctggggtggaaaacatatcgtcaatctagccgccggagcggacatggcctcgaatggaaaaccgctacttaatgctgggtttacgggccatccgagccttctcgagattcctagcgagatcgagaaaatccaaatccccgtaagctttgcgcttggggataaagatatagttctaaaagctccacacattgagcggatcaggcaagtgttcgccagcgagtccggtactggaaaaggagaagtggtggtttatgagggcgccggtcatggcttttgtgtccgggctgattttgttctggaagatgcgagcagacaggctgatgaagcggaaaaccaggcattggcctggttcggaaagtattagcagagacaaattgaagttttatatttagttcaaatgagcgaaaggatgaatcgaggacatgtaagaggccgggccaatgagagcattgtcatagccacttcaacaccgccatactgtggcagtgcgaatcaccaaaattgccaaaaacaaaaacaacaaaaatcaacaaaaatcaacaaaaaccaaaaatatctatctcccttcggtctgcccagtgaactggtccaagttccaagtggagaatatgtagtactctaggctgcaggaatctcaccgcagtccatgcagcctagtctctttttttctgccgatggtttcttcagttccccttctatactgttcttttgcttgatcatttgcattcatatatgcctcaaatttcaaacaccccagaatctttgcttcctcgctcagattctcgaaatccagcgacaacatgtagaggcataaccgcccaaggccggccctgccgccgttcattggcatctccaaatccgtcacctgcttctacccctagaaagaaggatcctcgccaagaagctatagatatggcatctttgtactgctggcagcacaaagatcaagatccttcggccaatccacatacgactgtcatcactccgtccaagacgaggacaagtatcgatacattaatggatcgactgggtgtgctcgacataaatgatccagcctcccaaaagccaaagcctccccacaaacggcggacaaatcaaagtagggccagtgaaaagcgtcgaccaaagaaaaagaccattttctgctgcttccagatcatggaagacagcggcgaggatgacaggccggccccagttcaacggcccaaaccccctcgccctacaccttctccaaatccgaaccaaaagatcaatctgccttcttcagccggaagaccacagcatgcgcaagtgccacacactcctcaaacatcccggccaactttgtcaggcacagggaagccttctacctcgcaaacacaggccttattatcgtggatcccatccacgctttccccacagacaacatccattcttatcacggaactggccaaacccatctccagcgccgacgacgaaggctatatctatatgttctgggtgacgcccccaacagctacgacaaaccggagcgccgaatccgcagtaccgcgagacatagcatcttctctactacccaacaccccaaaaagtagcaaccacctccgcccacgcacccagccacgcagcgtcagcgaagcaatccgcgcagcacaagacctcaatgccctcacttccaacccaacatcaaccaaacccggaacgctcaggctgaaaatcggacgcacgagcaatgtgcaccgtcgcctcgctgaatggagtaaacagtgctcatacgacttgaccttgatccgttattacccttatacaccatcgtcctccgcgtcttcccctgctagggtgccgccatcccacagccggaatcgggccccttctgcatcttcagtaccgggaaggaaagtcccgcacgtgcatcgtgttgaaaggcttattcatcttgagttggcggctcagcgtgtgcgagacctaggacaatgtcctgagtgtgggaaggagcatcgagaatggtttgaggtcgaggcggaaaaggagtcgctgaggagggtggatgagtgtattcgacgatgggtctcttgggccgagtcgatggcttgacactgtagcctgtttatcacctcgtacattctgtttgggtgcatatataaacgtctctatacacattcttaccagacccgacagtgagttgtttggggaaaggggattatatcgaaagtcatgtataagcgtgagcacttcgactgacgagcgggtcctttgcttgacctctaacgggggatcggaatcgggtactctcaagacgaccaatttggaccccaaatgtccactggtgtgtcttacggagagttgtccgcccatgtgcttatgccgaaatggagcgtatagcgtattgaggttgcgaccttgatgacgacctaaccatctttgacattgatactctcatccaagagcattggcaaattcacgatccgcgactaccgcttgacgaggataatgctgcctgactaacccctgtcaaatccaccgtcatgtatcagaccccgttggattgacccgtgatttatcgtaccgggaatgacgtgtggtttgcggatgtttaccagcatccccaggaggtgctggctcgcgttcgacatgactatgccgcgatgcaagccctgggacttgagtagggttggttgaaagaaggggacatcacggaagtgggaatatccgatgatggcagctcggactctggtgacgtcctgaaccgcaggaagtgaggtggatggctctgcatggacttgggtggcttttttgcggttgttttccgggggttcgtgtccacactgctttttcattaggtttttgaggcctttgtgcctccgtttccatcgctctggcaagccacccatgagggccgttgagggtcagtgggacgacagactcgattagttaaccatgagatgccaatgtgaaacactcgatctggctgaatacacagatgttgatatcagaacgaggagtgtctaccaaataagacccctatgtcgttgtgcaaatccagatagaccgtagttatagacatgggtattttgatctatttacctatttacctatcttggtatgctataccttccgctttaccagcccacggaagaagtcgaagctgttactatcactctgcaactgccacacacgtcccgtcggacgatcattccaccccaactcctcggcgagcaaaagaccaaaatcacgggtgataccctgaatgcgagcgcgagcaccggcctcctcctccagcgtgacaatctggtgcatgtgcagccagtcttcataatacatcgcctcaaagcctcgatcgaagcctgtgcgcaagaaacgagtatacaaggcttcgaaggtagtcagaatccgagccaggagcctctcgagcgtgacgggtgaagccgcagcagcgcccggggatgcgtagcgttcggcgagggtggtcaacgcggttgtcggagaggcgttggtggcattgacgccaatgcccacgacggagatgtactcgtttgacatgaaatgggagttgataagaatgccgcagattttcgtgtaccgcttttgttcggggtcatctggatctagtgcatctgtagatattcgtcattaataaaccatcgatagtaatataaacaactggcacgtacaaatatcgttcggccattttagtttgaccgggatcttctcgtagcctttggcgtagttcttgattcctctgactactgccatggcagataggtactgaaggaacacaaccggtgccgactgaatcttgtccattgggtgccgcaccacagttgaaaacatcagagaacctgctggtgagacccagacgttggatccacgcccgcgtccagcaatttgagcggtagcggtagccgtaaacccttgcggcaactgacgaagcagcttcgtgttcctgctgttctttagaggtgaccaaaaccagacttatcgaccgaagtgcttacttttcaaggattgtgttcgtgctagtcactacctctccatataagagattggagccaaatgtcgtggcctctcccttggactcggcttggtattggcggaggtgggaatagaacgcatggtggttgaagtatggagttagtttcgaagatggtatatcatcgtggaacacgagtcgcttgatgatcgcctggtaatcaattataccttcgctagactctgaggatcctgccgggagcgattcttccagttcaccaagattccatgttccagggcgttcaatgcggaacgtatcgtggtcgtccttgagacactcggtctgaccctcttgagtgaatgcagctccaagacccgacaggatatccataggaccatcagcctcgattccagacatgtgcaaagacgacaatgaaggcactgttgtcgtgtcctgcgtgacctcaagtccgagtttggacaaacaagccttcaagaagtccgtccgttccttgtcatcggcagcgagagccgccaccatgtccgcatattcaggcccgcccgccttcgggtccagattaacagccgcaaatctagtccacaagtcagtgactcattcctgtcaatttaaatccaaaacatactcaggatgaggtccggtcaagactgctgctccactaccgactttgcagtagacaacagcagccgcaccctcccctccgtcgacattcagcttttcagtgtagctcgcaaggacctctacgccttcgtctgcgaacgacagtgcatcaacgaagacaccaccgccattgtagtacgaccggaagtcggctggcgcggcgccaacgctcaaggcttccttggccacttcgagtccagcagcgcgtgcccccgcctcgctgtggtaaacgaagcccgggaatgccccgccccgacagatgcccgggtagaacgccaattcgcgatcccctactacctccattgtcttatcaccgacctcgaactcacacctcttgcatccgtagtagccaccagcacatagaccgaggtatcgtccgccattgcggacaaactgcgcgatgcgccggttccccgcaccattaagtgcgcggcagtatcccatatccgcgccgcctggcatgaccagcatggcacacgtggtcatccaaggctctttaaggagcatgtcactcgtcacagggataacggcatagtggtgggcgagcagtcggcggagggtgtagaggcagtgacggactgagtcaacggtggttccatttcctatcgagaattcgtccgtcagcaaacggctgcgctgccaggctaaatagggttagcgaaccggagtagaccaggacattaagccttttgccactgaaattggcgttgttgcccgttggcgttgccattgttgtctcgttgcaaagggaaatccgcgcgataagagatagttctccatcttccgccgaggccaaccgcccttctccaacttcctaggtttccttgttaccatacctcagctatgtcgaacaacgtggaaaagacaactgttaccccggatgatgatgagccggatgattggtgaggcctttttcacttttctggtctgtgtggtgctaactacaatggcagggacaagcggatcttcagcacaggctgccatagtaagttatactcaattcgagtcataaaagccatactaatactgttcagctgagcaggataagatgaatgactgttactacgcaaagagggactggcgcgaatgcaagaaagaggtgagctataatatccaccaaactgaacatatatcatcctatttgaagccattggagggtcattcctacaataatcatcataccagttcttcaaagcccgacgcatggaagaaatagcatataacttcgattctccgatcatactgactctgatcaacacagatggaagctttccgcgagtgctggaagcgccagggcaacgaccagcgaacacagaccaaagacgcataatgtactctacccatttataataccatgttaaaatagactctccgatcaatcccactcaatatttacgcgattattccaatatcgacagaacgaagctatcagttcatatcacgtgatcatatatattcgctcgttgcaagacctccctcccccttccattatcaacgaaacaagccacgatgtctgctcctctccgtatccggtccttgtgggcaattgaggctctccaaaatgcgacccagctttcgcgctcctcaagagcgctcaatctaacagtcagccagttctccagccccatgaccagaagaacaatcagccacaccaccaaaaaccagaacaatcaatccgcagtcaagcccacaccagaaagctccacctcaaagccctccccctcagttgcaacccctactccaacaggcgtccccgcatcccgcgtcccaggcccaacccccaaccgcgcaacaaccgaaaacatctccaaaacaggcctatcagacaaacccctcgagctcgagagcccagccgaagagagaatcgactggacgcgctccttccacggcctatccgccgaaccgttccccaaagaagcagccgatattctgctggcggagacggatccagacgaagtcgagatcaagcccgatggcatcctctacctaccggagatcaaataccgacggattctcaaccgcgcgtttggtcctggtgggtggggtcttgtgccgcggagtgagagtatcgttacgcctaagacggtgacgagggagtatgctcttgtttgtaatggacggtaagcacatttacatttcccctgccttttcacatcaatcttgcattttatctaccagtcttgatatcgatttagcctagcccgtattgggggactaaaacaggaaccctgagctgacactcttctcactagcctcgtctccgtcgcccgcggtgaacaggactacttctccccggacggcatccccaccgctacggaaggctgccggtcgaacgcgctcgtgcgttgctgcaaggatctaggcattgcgagcgagctttgggaccctcgctggatccgaaagtacaaggccaagtacacgcgcgaggtgtttgttgagcatgtggttacgaagaggaagactaaaatctggacacggaaggatgatcccgttggatatccttggaaggagagtggaagtaaataggggtagctgggttttggcttttgcctagacttcgtcaaacttgtattatatcaatttgtttcgataggtgttagacttggggaatattatctgtttctctgctcgatattttcattggagtgtttcgtggtttctgctgagcatataccacccatcagatagtctcaagggtgttatctaacaccatttctgttcccaaggcactatgtagcctgttgtctgatgttagatcgaaaggcatcattagataccgtagcatagtcaggtagtaacgagctgcaatgaaaaaggttggaggaaaaaaaaaagaaagtagatttgattttattaccctaaatatcaggaatagcatagcttcatatccgcacaacacagagggaaattttcacgacggcttaaaaacgcagagaacagaatctatcgacatatcacacataatatgaacaccccgaggagaagaaagagaaataggtagccaggaatgggtaatcaaggaggaccaggggtacagaaaaacgagaaaacgatcaagcaccatgctccccatagggagacttatcctttttcctgagcggagcagtgttgtacggcgcagcctgctgtgggggcgtcggctggggcggggggtacatagtcggcggcgagacggggtcataccggtcagagagctggtagttactggccgccgtcacggccgagatgttcgggttcgaaacttggcgatcacgtcccggtgtgttctcagcgctgtggctgccgaccgggacctgactgtaccccgtttcgtgggagtagtagccattaaaggggttggggtcgggggagcccaccatctggatggtgctctggtcttgatcatggcttgagtgaggacggggctcgtagcgggcgctgccgcgggagcctggcttgggggtctcgaggattgggacttggcttgaggatggggtcatgcctgcggggaccggggagagaggggggtttctgagggcggggtgcacatcctgctcgtggtaggagacgcgatcaccgaccttgcggtggccggttgacaggccgcgcttgatgctttcgtttccgttgtgcacgtttagctggttgccttggttggaggcgttggtagcagtgcggtggagggcgttctcgttcctatcgtagtcgtcgcggccagtatcgacagttggggagcgagcgttgagcaattcgacgatggccgcttcgcgctcagcgttggtctgggtggagccgcggtgggtgattgttcctgagcggccctcttcgtatcctgtcgactgggctgtgttctcgtagttgagtatacctccggccgcagcggcgacgcctgggtcaggcttggaggagtcggccccgccgccctgggtagatttgcggcgacctgcgccagcaccggccccggcatcatcacccctgtcatcgccatctgcggcgtcggcgccctcttccgcgggaggttcaacacctggaccgcgaacctggatcttgcggacggctaggaccaaagcacacaggaacttggatcgccgggcagcgcgaatagtctcattcgaccagttagacttgtgacggatatcaacacgcagctggagcttgtccatatcaccaacaccgtcgagctcaatgtcaatatccggctggaagtcgcggcagttatccttgtcgcgaacaaagttctccatctcctggcgcagcaattgaacctcagcgaagctagtgtcaaaggctacggggatgacaagctgttcatgcatagcattggcgcgagtgaagttgtcaacccagagactgttcagaatattgttaggcacctgcgtgatgcgggaatcggtaacactgcggaagacggtgaaaagaagtgagatacgctcaacgacgaaaggcttgtcgctgacctcaacacggtcgccgatatcgaagggatgcttgacgaagaggaaaatgcaggaaccaaggacttcttgagcggtaacggagaagacgaaactgagtgacagcagcgaggtggcaccagctgcaatgacggtaccgaatccactggtgacgaaagaaatgaagacaagaacagcaaccagtgcagcgacacacatgagcaggttgtcgagcacacggatagcctggtcgacgtcgtgcatgctgtggttcagagcctttctcatgcgtccaaactcggtgatggtcaggaccatctcgtccagactgatatctccgttgccatccctgtcaagagccatgaagcactcctcggcctcggcctcatgttcagcacccaggacctcgacgatgtcatccatgtacagagattcacggccctcgaccacaaacgacatccagatacggcgggccagcgcagccgcatggcgcttgcgctcaagggcatcgataaccatggtgtgtgtcgcagtcgggttaaacacttgtttaccggtaagctctgatgccacgtgcccaaaagcggcagtgaccttgtcgccaacacggccgacattcttgccgacctgacggatcatgcggaggggcatagcggatgaccgtttgccgccattggtgccggcctgagcgaggatggaatcaaaaatgagcgagtcctcctctttgaactcagagcagtacacggggaacatattgcgcgaagcctcgaagaggatggtgaccaagtgcacattgcgcttggagacctggatcttggcatcgaactgcttgcggtggtagctgatggagatgagctgtacaagagctttctcgaccaggtaaatgaggctgcagatgagcagcgcaaacaagatattcttgacactcttctcccacgccttgggagccgtgtcgccagatcccttcttaccaggattcaacgtcataaccggcaggaaggtcacaagggagataacaacccagatgacaagcgcaatgggggtctcgagggcgcggagaataagcgcatacttgcgggtaccggagctgacgataccgcacaagaactggaagacataaggaatgtaacgggcgaagatcttggacgcccacagactgaaccagacgatttcgatccaagtgaagaaccagtaaagatgaacaccaccaattgtggcgtaccgcgcaaccgtagcgcccacaatgatcggaatcgcgatcaaaatcgcaatgggaataacataaatcaggtaacgagtgatgagggagtaattcaggacagcttggtagacgcggcccatacgggtgatagtgccatcctcgggcgactcggcaggctttccggacaattcattaatatcggtatccgtgcgacgtctgccgccaggaccacgacgatgggggccaacgataggttccttctccgtgacctcttgggggctggtgttggtgtcccatttacgggcacccgtttgaccacgggaagtcgtctccgtcagagggatatcaatggtcacgtcgttaggattcaacatcccattgccatggtctggcatgtcgtgcagctgctcgaatcgatgagccgtcagtcgcttggtggaaagactcgagcgtcccattgcaaggagctcgaagggcagacagggcctttattgtgtcaatgcagatctgcccctaaacaagtaatttcaattgcggagggccttcgtgtctattgtggagacgcgaaaaaaacagtcccgttatagcacaccaacggttggtagctctgccgttctttcgcctccccctcgccgggtaaaccaaaaagttccgcggccaactttttttgcttcacgatcgccgcaaggctatgggtggttatgattgccaaatcagtgtgcgtggactttggtagtcgatcgtccaattgtcaatggtcaagaagtaggtggagatgtagatcggcgaattgggtgtgttactagtgagagatcgacccaaagtcgtaaatgtacatatgtacagcaaaagaatgactaaaatcaagagagtgtcaattgcaagagaggtggaagaaagaaagaaagcaaaagacttgaagaaaacgcgacgccatggacacatgcaacgggcatgccgtgtttcagcaggacccgttgggggggaacaaggcaaaaatgtgagaccgccctcttcccccctgtggaatccttccaacctcatcattcgctgtttatctcttggtctgtgtctttatattactgatcgactctagattgctccgtgctggagaccctcttcttctccatttcgccttacgctccatctcatatattaatccacgtgatcctcgaataggatcgagaacgcgaattccgacatgcaggtccgctaccaccccacaccttgacttgtctgatggtccaatgagcagctcaagtcatcgggtggcttgagatcaaaacagtctacggagtattcggttagcccgacggggaagcagaaaaaatcgctggttctagacgcatcagacgcacataataatctacaacatatgttgtatttgatttatactggagcgcagggcgtgaaaacctgctttacgccctcgagtcaacatgcatcttctccagcgcagcaacaacctgcttcctatcccaaccagcctgcaacccccgcacaataatatcctgctcactctccggcgccataccacccacccccggcggcctccgatccaaattcgtagggaaagggtaaccctccgcaacagcctgcacaaaagccctaatccccctctgttccaacgaatgcgtctcaggatcaagttcctgcccagccaaaacacccccagcagcccggaaccgctgaaccagtaaatcccaagtcgcctcaacaagcggcacagaatcaaccgtctccataggcttcccaaaagcactactaatctgcagcaaattggcaacacgtctgaaccccccatcctcaggatccatcagattcgcgccggcggcatggaaaagcgccggattaaaaaataacccatccccaaagctcaacggaagcgcaacatatctctcctgaaagaaatcccggaactcagccttccgccacgccagataccctggcttgtaggtctgactgaaaggcaggaaccgggttggtccgctaacgacaggcatatcggtatgcgcgacggcgccctgcagcgtcaggaactgcgaggtcagctgcgtcgtggccggataccgcttgcaggctacttcttcctggaagccgaggtggtagtcgcggtgggcttcttgtgcggcgccgcctgggtgcacggcgttcacttgggctgtcacgcggtaggcggggcctagccaagactcgcagactgcggctagccatgggtttgagtagtagtcgatgaaggaggatgggtcttgcagggcgtgttttgagaaggagttccagatgcggtcgtttgtgccgcctacggcgaaatggtcgcctttcttgttgtctgattgtgcggcttcgcgggcgatgatctcgttgaaggcggtgtttgtggtgtttagggttgtttcgtattttgcgggggcgtacattgaccgtagcacgtagacgcccgggcctgtgtgaaggatgtggtgccattcatcttgaaggcggttgattagatctgatgtaaggcctgcggattcgagagcggcgaggtcatagatggggatgttggatttgacttcgctagctagtgggtaggttgctgggtctgtggtttgcgaacagatgtccttgaactcggagagttggggtgtggagggggagtagagacgggatgaaactcggtgaccgttcatggtatatatcgtacttctgtatatgacatatggagaaagtatgcgtatgtcccaattgacccattcggtgaacggcttaaatatattttgcgcggaaaacaatgtccatcgggtccccgcattaaggtcggatatacggagaagtggacatcaagttgcgactcgggaaagggtttccgttttgaataaataagatcgaaaataagaatagcaaaagagttctagacctagatgggtatcacagctatcaagcagtacaggacaggtctaccgctaccactgaagcacaaaaaaagaaaagaagtcaaataaacaattcggtcctccccaaaaagcaacaggagaacaccgagcgcaagagagccttgccttgtaaaagaaagaaaaccagacaaaagcccatgcataaaataagtggcatccgtgttgtgcctgtttcataaagatccaaatattcccaacccacgcaaatctatgcttgaatttcaaaaacgtcttttttaaccaaaagcaggaggaaaggaatttcgtaacggtgcgtgactgggcactgggcacccgtggcaattcatgcattcatcatgaccgctccgaggtccgatgtcaggacagcttcggacggcgtgggttggttgtttttgttaggttcgccgaggatgagtgtgtgttcagacatcgtctcgatcagggcactcggtcttccggtgacggtgaagaggaccttcaggaggagagtagggccttgcccgttgagaccgccttgaggttggcgccgggtgtgggtgagtagcacgcggacgagttcgcggattgctccgtcagtagacgggtggtggattgcgtctaacccgtcgattataaagaccagtaatggtggggcagattgtaagagggtgtcgactagcgatagagcggctttccagctggtgagagttccgtctaattggcgaaaccgttccgcactgagatccagaacagcgtcactgtcgactacgggaggaagccagtcgattaattgccggattatactgtaagtgagggcaattaagccttgctcgtgtaggttcagctctttggtctcctggctagggagggcgcagaaatgcgagacgacgggcagtcgagcttgacgtgcgaatgaggcatagcaggctgaaattagagccaccgggtcgagggaagcggtaggctgtgtcccgcccacggctagggcctgggatcgcgaactggtggcccattgctgtagagatgcaacgatattcccctcggcgacgaccttgatgtcgggctcgtagtcgcaaatctgatcgtcactatcgaagaagtcctggaggtgcttggatgaactttgaatctcaagtcgtgcgaggcggcgtttggatcccctcgaccattcaaaagaggacgtgtctaacaaattccgtcagatgctgaatcgagctgcaaattgcatatgactttttacctatatttggagctggaggcgtagttatgcaaacaatgccactgctctgttcactgactggctgcagttgctggcgcacagaactcaatgtctctgccaataaccgatcccggccctccctataccgagtgcgctcctctgcgtcttgctggatctcccaaatcagacggcgggtgatggtattttgcgccgctatccgacggtcctttccccggcgtcctacttggctgagtcgggactcctcccaaagtgcccgggggctatacgggtcctcctccttgtcaacatccatcgccgcatgttgccacggaagattccgcgcttgcacttgtatatagaggaccagatgatgaaattcggagtacacgtcctggctgtgcatgttcaacaactggcacgtggacctccgaacataccaatccatgaattcggtcaaaaagaagaatattagagcgtaggttttcgtaatatgcggaacggcgtttgagattagggtagcatcactaggaagatctagagcatcgtgaatatttagcagggcagtagctaagccctccattacccgtgggtaatgcgacgatgcctgagctgtatgttagcgatgcgacgagatctgtgtatagatcatccacgcaccttgatcactgattggaggactccatagaataaaggggtataggccatagggtccgggagggcggaaaggagggtcgcgtgtgtgtctatagtcggaaggagtcgatcgcacaagtccatggaatcgctaaaaatccgttgtcgggggcgggacatccagaatgtcttgatatttccgagcaaggtctgcacgtcaagtaccgtctgtggccgctcctcccattggacctgatcctggggcaggaggaggctgatgaaccgtttccaggtgtgggccaactcattgcgttcgatatcaagttcggcgatggcgggcgtcctgggaaggatacggggttagagggaggcacttgacagggttcggactaggccatcatgatgggtcatcagttcccgagaggtatatggggatgcttacgacgagattggcttcccgtcaaagcggtgttgccaggctcggctcgggatggcagtctcgggcatgatccgacagaggtgatgaagacaaagcagttgcagttttcacgacatatcccaagaaggagatgttgagtctaggtctaggacaaaagtggaagcgaaggatggggaaggaagaattggactttgttgaagggtgggttttgccgctcagagagggggaaggctaaaaatgagagaaggaagagacaggcgtttctattaatacctcgggttttttcccttctatctcttctggtttcaaggtaatctagagctgtcttatctgagtttatttcactttgtctattgtctttctttttgtccttttttttttttttttccttggtttttcctttttttttttttacccacagtgatctgatcgttactaataaatgcacttcgggcctgatgagagccgaggccctactgtctcgccacaggagaattgaacctgacttgaatagaatatgataagattcttcctaggaaggtataggatatagaatatataacatataagcatattatagttgatcgcatatcagatcataccaataaagcggggactatacaactatacttaaaacattcatctccgggtgttcgcctctccagatttcattctggagagaaacgagaacttaataaggttctggtccatttcaagagctcgacccctctttctttttgcttttttttttttttttttttttttcctctctctctctatcacttgggtcaaataatatggggtgcgtcggttttaataggtatctgcgggggagcgctgatcgtggaacaataatccaagagctgaagaagtctattaaggtaaggtaaggtaaggtcagatcagcacatcaggacatggggatgatcgggttaaatgtccaggtctgggggttggaggcgccgagtggaaaaagaaaaaagagaccaagacctaagactaagaccaagacataagacagtggacggaggtccgggattttaataagtgatctaataagttaaggcaagtcgggcgagtagaacgaatacgaaaccgatgtgtggttgtccagaggaagatcgacctttaggagtacatacaacataggtaaggtaagtccagcgatgacgttgccctcatcgtacctaaggttatatagtgtggccattgacgatcacacttttccgatgatatatattgtagttaaaaagtcaagatcagaatatcaatataatacattaatacatgaattagaatagaaagaataaaaagaataagaataggaagatagtaatcaaccaatttataatattaaatgaaatacaaaatcgaaaatcctctaatctcccccatccgctttgatcccccagccctgttagggccgatcctctcccctcattttctttcccggtttcgctcttttcgctcttattgactaatgtgacccccccacattattccactccgccgtctcccgcataatggggtttcttttctttctcttgttcttgttcttctcagttcaagcaaaggtggtgtcgctaccgtcaaatactactagccaatccactgggtttcgtattgagggaagccctctgactggccagaagcttatccccttagccgagtcgtcgattaccactgcccaactcaaggtgctatatgctcccattgttccattggggcattgctgacatcttcagtcctttaatgtttctggcactgccactcaagtcgtcccaagcaattctctcgacttaaaggaatcccagatcgcttgtatatcttgcgaccaggacgagtataccggaaatatccgagttgacgagacaattgaatacgtcacttctgctcattccgcagcagccattctgctatatagcaaaacagctatcggctgcaacttcacttccgatgaccagaccgctgcaccgtctccctatatcttcacgtttacaagccaaggcggctactctgcactactccgtgccttcgatcaaccaacaactatcagcatcgtcccaatgtcgtacctctcaggcgttccaacggacggtgataccggtagcggtggtggtgacagtccaaacactggttcgtatctcgactcctctaccttggccagtccgttgactttccccagccatgatcatcctgtacagtatcacaggtatcatcaccgcactattcctgggcattatcatcacaggtgctgtccgggctcatcgccatccggagcgatatggccctcgccggattgccgggcgagtccggcaaagccgagcccgaggtatagctcgagccatgttagatactataccggtcgtcaagtttgatgacaaaaacgatgacgtggaggccgctaaaagagacgtggagatgaccacgaaccctgaagatcgcgagcactcccatgcggacgatggccacacaccggggctatcaacgccccgcgaatccgaaatgccaaccccagacgataacgagcgccccacacccacacccacagccctcggagccaggcctgagatgcctgacgcaggtaacttctcgtgtccgatttgcacagatgatttcatcaagggccaagacctacgtgtactgccctgtaaccaccaattccacatggaatgcattgatccatggttgatgaacgtgtccgggacctgtcccctttggtatgttctatttatgttgatattgatatcaaacacatcaactcctatgcacgaaccaaactaattatatcgtagccgcatcgacctcaacccaccccaagccgaaaacccagagcaaaccgaagaaaaccccgaccatcccgaccaacccgaccaaccatctgcagaaggacaagtcctgaccacggaagatgctcgccagcaagcccgtcagcaagcccgccatacgcatcgccgtctaaccaactacctccacggacctctcaatgcccgacgaatgcgcgatgccaccgttgaggagcgactcgctgcactccgacgcgtccgcgaagcaaaccaaagcgagcccgcgcccgaaggatcacaccgtggcctgactacccggctacgcgatcgcttccgcatccgaacgcgcgcccacggtgccgaggctgagactgctgacgacaatgctgcgccttctccggcggctccggcgcccgcccatctcacaccgtctactgcatgatgcgtgatccgctctttcacataacactcctttacattctgcatatattttcgatttatgattcatatgatctcaggtcctcggtcggaggctatatggctatatggcgtttttgttttcgttctatgggttttggatttcttttcttgtttatttttatggatcttgaacgagcatggcgttctttgaatggggcttggaggaaaagagactggatttctcagtgatttgtatttacttcctttctctgcatatactttttgtatatcatggatttatggtcacatattcaactcatacattcaaatgtttctctttttttgtaatgcacgtacataatcctattagaggtatagagatagagaaatatagaaataatttacatcagggagttctagactcaaggtgagattcgtcatcaatccaccctgcccaggtgttctgcagcagatgtaagttggggctgtgccaggtcagcagggagcagtaccatgggttctgcagctttatctcgattatctcttttatctctatcaaatatcttttcttgttgtgtacataaatatgtcatatgtacctaggtacatccccaggtatatatatatatatatatatatatatgtagacatatatatgaggctttattaaaactcatatcgaagcttggaggactccgtacccataatgtgttaagatcgccaggcacaagtcagtcaccatcggaccgattggctgatcgcatgtgacacaaatctggtttttatgttggagtatttgagggatatattagtagttgaatctcttgatcttcatattattacgttcacccactatatgtaggtaataattaaacattcaaccccgtcggatcgggctattatcttgctgtggggaatcggagaaagtcccccaagttcttttcgatttctccgggatcctcctcttagtcccctcacgggtgtgggggaaatggagttatggagttcatattctagaattccagtatacaacagtatacaccagtatacttctctggtagaattcaattaccattttataaacataatatagtggaattgaataaattgagattcccctgagactaaactggtcatgccatgaccttccagaagtacccacagtgcgtctttttccgtggtatgacacactgtttctcggatgtggcctgtcggagaggatgtgttggagattcccggttttattttgattttgtactcttgtggactctggactctttataactcaacgttagaacaatcactactacatatgtagtctgtaagtctgtaaatctgtaaatctgtcaataccggcatgtgaacggagaacgataaaaatacggcaaagctcttccctcggtatcttgtgcgccgaggatatacaaacgagataaatatgtaaatataagagagacagaagacattagaatatcttccgatgaccaaaaagaatgcgctgattcccccaaaacaaccccaccccctcactccatccggtgaacgcaagcaggaatatcccgtttcggtgtcagattccggggagaacttacgttgggtaacttgcggaattatctaatttatataatttcaccatgacttccactcaatccgccagagaccgtctttcttctctatcatcacacatcatgggttcctccagtccttcagtatttaccgcggccaccgtcgctgccgctcccgaagatcctttgttcggtcttatgaaggcctatcgtgaggacccctccgataagaaggttgatctgggtattggcgcctaccgcgacaacaacgcaagaccctggattctccctgtcgtcaagaaggtaatattcatatttcttctatctctatccagttatctctaacatctacatctataggccgatgacgctatccacaacgatcccaccctcaaccacgaatacctctctatcggtggtctcgccgagttcacctccgcagctcagaaactgatcgtcggcgcagacagccctgcaattcgcgaaaagcgagtgcgtacctctctactctcccatattcccacataccttccaacaaccccacccggaccaactaaccctcccactagatctgcaccctgcaaaccatctcaggcaccggcgccgtccacctaggcggcctcttcctctcgaaattccacccccaaaagcccgccatttacctctcaaacccaacatgggcaaaccacaaccaaatattctcaaacgtcggcctaaccctagccaagtacccctacttctccgccaaaaccaaaggccttgacttcaacggcatgatagccgccctcgaagccgccccccaaggctccgtaatcctcctccacgcctgcgcgcacaacccaacaggcgtcgatcccaccgaagaccaatggaagcaaatcgccgaggtgatgcgctctcgctcgcacttccccttcttcgacaccgcctaccaaggcttcgcatccggcgatctcgtccgcgattcctgggcgatccgctacttcgtcgagcaaggcttcgagctgtgcgttgcgcagtccttcgccaagaacttcggtctctacggcgagcgcacaggcgccttccacttcgtctccgctcccggtccggatgccgcgcctgcttgctcgaacatcgcgtcgcagctggctatcctccagcgatcggagatctcgaacccgcctgcttacggtgcgcgcattgctagtcgtgtgctgaacgatcctgttctttttaaggagtgggaggcggatttgcgcacgatgagtggccgcattttggagatgaggcagggtctccgggatcgtctggagaagcggggtacccctggttcgtgggatcatatcacttcccagattggcatgtttagtttcactggtctctctgaggagcaggttttgacgctgcggtctaagtggcatgtctacatggtatgttttgactcttactggtggagtagatatatgtttggaattgcggttgctaactctcttttttttcctacttgcagacgaagaacggccgcatctccatggccggcttgaacacgaataacattgactacttcgctgaggcggttgatagtgtcgttcgcgaatctgctaagttgtgatacctatctgataccccggtcttgatatagagtggaaaccctcgaagagacttggtttggcgttctatttgctttttgaatacaagttgttccatggaagttcggcctttcttatgcattaaaataacccatactctagtcttggccttggtctcgcatttctcgttcccttagatatagcctgtgactaggtgcgtctggggtgtattccaaagttacctaggtagatatcacatgcattacatgtaaatcataggtatagcaatgcggcattgggattgtggtctaacttttgttccatggtttctgtgcagtacgttggtagaatttcgcattggaggttagaatatcaattcaattggccatgctggactgtccgtcctgtcctgtcaacagtaaggcctgaggaagtacacagtaactaccacctaattgagcaaaagacctcgggagaatatgctacattccaatgaaatagacataatggtatctagtatcgtataaaaaggcttccacggaagcttctgagtcagaacatgtctagtagtatcgggactaaaacaccaaatcccataccacaagccaggtacacaacccgacagtaccccagaagacagcctgcgccgtactccgtcgctccgtagcacgcttcagctcccgatttccctgcccaacattcgtctgcgtcgtatccacgtccgagacaagctgggaaatatattcctcctgcgtagcgaggtgggagacaagcgtttcctgcaaagaggagatctccagaagagacttctcggcgtttctaagagcagcattagcatcatcctccaacaaaccaaccggaaaacccagcaacgaaaagggaagagagaaaaaaaaaaaagaaaaacctactggaccttccccaacgtatcctcataatgcctaagcatagaatcattctcctcagcaaaaagctgcaactgctccggcgaaagctgcgcttcaatccgcgccgtatccgcctcactcagaaccgccgcctcaggcgcctggaaagcatcgaatccgaccgcaggcccaactccacccccagtcctctccgacacagaaacagaccccttccgacccgcactcccagcagccttccccgcgccaaccttataaagcacgctcttctccttctcccgcaccctctcgatccgcttctcgaccatccgacgctgcacgctgaccgcgcactctagtccacgtctcaggaaccaaagcacgctctcgcggactgtcgctgttgaccgtgcgctctcctctgcgcacacatgctctgcggatttgctctcgtcggcgctggcatctagtgcgccgcctccaccggcccagcgccagaggagggcgccggcggcggagtggccgtatttcttgtggaggagggtggaggaggtttcttggcggagggattcggcggaggagaggtttgcgattgaggttgctaggtcgcggaggaggagggctgttgaggtgtcgacttcgtcgcgttcggggtctgtgaggtttgtttgtggggttgctggggtggcatttttagggttggtgtttgggtttgggttgcggcgttggggttgtgttgttgagaggtaggcgtggcggattgattgtagatatcggaggagggagttgacgtgtgagttctgtgggggattgttagggtttgtttctgctttgctggtgttggggtatgggtatgggtatgggtgtgagtgcggaggacgtggcttacgattcggtatgcctcctttaggaactcgtcggtggtttctgtgtagggttttctcgcttgggagattgatgagccttgctttgaaagcagattgttgagggtgggcgttaggtcggtcattgtgggagtggcatggtctgaaatgtgtgtgtagtgttttgctatccaactgtacacttgtcgatcaatactcaacgtcactgcgtgagtggtttatcccgcaccctgtatttgtttgtgtctggggtaaggagtacttttgtgatagagatgggatgaggaatgccaccgaatatattaaattatctctatttgctctcttgcttttcattatgcaactcattacgtttcaggtgtcgcatctacacagaattagcccaacccatctaaccatcatcacatccatccacaatggaggaagcccaagtccactatttacgagccgttcctgaaggcccaggtggtaacgatcctcttttgatcatgccagatgccaaggaaatgtcttcgtcagaaatgcgaggacttccaaggctgcctcaaagccatggccacatgaccatgaccgggttcgtctttcccacacgggccgcagaccggttctggaacccatcctatgaactacccaggtagagaagtgcgcccatgtaatgatcggaaccatgtggctgctgtcaaagctagggatggttaccgcggccaaactccacatcctgagtcggccgtgtgaaagcgaggaccgcgaaaattataggcaatacgaaccgcataaatgaggagacctgggttgaattcggcaaccaggaaagtacggtcatttagatagtgtggataacttcggggttggatcttgagagaacgacatagcacctgggttagcaatacagaatgctggcacgaacaaaatggtgaagacactggttccgatcaaaattgaaactaaatgggttgaagctggggtatcatcgtatcaagaagcttcttggctacatggaaagcaatggttgttatgtatggcgtcatcaatcataaactgcagaagtacgaattgaggcagcttcctacacatgataggtatcaggaggatactatggctgtttcgcttctaagaggctgcagaatggattagctcatgacagtggtagtgctgggacaaggaccgtcattatgagatgaacgtaaggtttagaatatgggattggggtgttcccttgatggctgtcccaaggttggattggaggcaccagaaggcactggaagaacgaagaccagaccgatactctgaatacgagactggaggtggcgagacacgtgggatgatttgttttggacatctagccagcgtctgaaagaaatctgaactgaaaacaatatcaacaacctattgcctgatttctggaccttttaaggagatagaaatatattatagaggttgagcagactaaactataagactatataactagttatgtaactaaattctgatatacctagttagcttattcttgtagtggaaaagcccgagtggcgactccctacccgtggacatatagggattaatcacatacatattactattcttgataggtcatagatacgttttttggccttggaatactctggacaaaggttaatcaagtataaacttgcaattggcgggaactatcttcttatacctgtaacgctaaatgtctaggaatcaggtttcagatataggccacacgtcaccttagtgacacaactgtgcttgcctatattgtatcagatttatttatttgtttcttaaaaggacctcactctcctctcttaagttacccaattcaacaattccatatgcacatccaaaatggcccgtctacctcaaaacatacacccagcagcatcatctactgagctgcccaccctacgctccacacccgtcaggcggtcgatcacttcatactccatgccttgccgaagtgaccccttattgtccagctttggaaataccaccgatgtcgcaaatgacgaaacccgcgactaccactaccaagtcaaagcgactctcacaaacattctcaacgacgaccgtgtgaagcacgatcccagcggaagtcgttgcctgcagaggatattgttggaaaacgaacaagacatgcggaaacagcgaagacattcactcggcgcgtgtgctgctaagcgactatctaaaatgcactagtagtacaagaatcaacgtccatgcttccctccatttccatcagggtaaacggtcattagtagattgcttcagtctctggcagacctctcacaatgttctcttatgcttagaccgggattgaaaaagaaacattagtatttctcatgcattgatcatattttcatgctaaatacgcaaaagcaagggtataaacaaaaatcatgctaatatcaacaaagaaatccaatcaccatgcatcaaatcatcgagcgctcttccacccatatctaaagcaacagtcagcaaatgcaattctgaaaggatagaaaaatggacagataaactcacctcgatcttccccatctcactcccttcccgtcgagcaacctccttcgccgaactaaccagtaaatccagatcctcctgatcaaccatggtaatcatatccccatcgtcctgcaccttcatcttcaaaggacatttgaagccgaacttttcccgaatgcgattctcgaattccgcaaactcaatcttcggcccaatcatgatatacctagtatcatcgggagcatgtactttcgtcctgaatttctgaatctcaggtctccgcggattcgcatggcgggagtatcgcgtcggagagcgagtccggcgttgttgcggcgactggctcggaccagccggcgcaccgacgagctcgaaagcgccctcgtggagcgttgttgcatcgcatgcatcgctgccatattcttcctcttcgtcgatgtattgcggtggttggtggcgggatccgcggccccagcctgtgctggctagattgcgctggcttgagtagggatcgtacgggtctgcgtggccgtagtcgggttccggtgggtaggtggttgtgtttgagtttgtgtcgctgaggtttctgcgatggctggtttgctcgcgcaggctgtttcgggtgctttcgggtgtgtatccgcgcatggtattttgtcgtgaggatgggccgcgcggctctgacgctgtgcgtgttgtgcctatccgtggtttctcggtcgatgctggttcctgtgcatagggtcgccggtctaggctggcgcctgctcggtctaggtctagacgtggtggacggactgttcggagagatgatgatcggtggtgtccggatgctgattggcttcctgagccggatgctgtgctgacggagcggtcgtctggtggtggtgttggggggaatacgttgcggttcatgggtggttcggattgttgacgggtgcggctgctgaggttttggcgcactaggttggatgaggcgaaggagactccttcgcggccttggagggcttctttatcaatgggcattggcctccattgatgatctgatgattgattgcggtccgaggcggcaactagtcgagccttgcctaggtagtcttttgtcttgagattcttgaccttggctgcgttgggacgatagaggactcccactggaattgagaagacagtatagccctgtatctggtttagcttgtatcccagcggattagtagactccacatacatcggcattctcgcgaatggcatcgtcgatcacatcgtggtccggggtaaccttttccttggctgcatactcaaggtcctgtataccagggttcatttgccggaggtagatatagcagagaccccggttgaacaggacttcgcatgaaaagaggcggaatagcagacctaactgttcatagtcgatggaagtattccctcgcagatacagcaaagtgtcattaaagttggccaacgcttcttcgaagtccccaagcaagaaattagatacgccttgctggaagtaagcgattgcgagataccggtctaggccgacagcacgttgatagcattctacctgcatcaaaatcaatcaactgtccggaagaacatctcacgggttcacttactgctttatgatgctcgcctagcgttgcatagatcactccgcagttaaacaagatcttcgacgtgtcggcaatctgatcgaagcaccgtagggactcctcaaattcttgattatcgtaggcatcaagggcttgcacccatgtttcgatttcctgttggacaatgtcagcatgcttaatgttccgagatcacaccagatatatttacttgtttgagcgacattgtctcggagttaacaacttatttgtccgagtctcctgtgcctagatgatatagattggggaaagacttcggaagtactttccatccgactctctagggcacgataatattcttcgtagatgtccgccagcttgtgggctcactttccagcgcaaagctgggaaagctcagataatataattgccaatggccaaggactcggtgtgacgaaaagacctctcataaaggggccaagaaccgatggggcggaacgagggggagacttcagaaagttgaagtcgagtaatcccatgtaatgtgatatcccgggattgacgcgaaaaggctgggtaccagttgaaatgtatttatagaatataaccccctctggagccgacgatatcagatgcgattgagaaagtaattggcttaacgtcttgacggtttggagagtggagatgaggggggcccagtaacttggaccccagaaggattgtattagcgggataaggggggaaaagaaagagaaaaaaagaaaagatgaattgtagagaaaatgaaaaataaaaaaataaaaataaaaaagcaaagaaaaagcccaaatcttagagaacacctgcagaggggctgcacggaggggcaggggggaagaggtacggagcacggagagtactgaaaaggctacttcgaccgaaaaggtgagtgatgggacaaaaataacccgctttgctgcagcaattatgcacgtcttggtcaataggatcttacagaagggttttccttctgccgagcctgtgagtgggcagattttcatcgtattgtgatggcacaactttactcggtcaatatttcaatatatgccattctgactctcctaacctctttttttttttgactttcatctctataattgaaagacccatcacataaggcgtctgcggggatttccaaggtttcccttggaactggaatgcggtctatcggggagaatccattcattggtcctcggcccccatgtcatctcaattcattccccgccacggcgcttgcagtgctttatttagagttgaacagggcccgagtgtatgttgtatggattttccaacatctcgctacgggctcatcaaaagtagattgcttggagatagttagttgctccgtacatattccttgagccatgttgctggtgctagggccgatgctcgatccacaggactatatatacacttcgtgacctttccttttccgttttagtgctcacctgtggacgacattcaacctctggcgttccatggttcaattcgagctgttacacacgcaaagtgactcgtctgctggatggaagtggatggcttggtatggactgatgctgacgtctgttagtcttcttatcttctcgccaagtccccagtggtgtacaccggtaagaagggttgatgaacgtatcaccgagtcggtccacatcaacacttcgacagtaaggaattttgttctagatcaattgatgtctatgaatatcattccaagttaaacatcaatacaatttacttacagtcacagtctataccagctggaggctgtccaagtgttcacccacggtccactatgaaaccggcccgacccgctcaccgaacaattgatacaaaccgttgacaggagaatattcttcgaggggaaggatagtgacgtcgtatcacaattgggtttggagtctatcgcagatactagcaagcatctcgcaatttcgatagctcaatcccatagccaaagagactagcgcactctagaccatgatatagcggtgaatgataggctagaatctctccgcagtccgccaacgccgcgcggggcctgcaagacggcacagctgcaatacgcacaggaaacgtcccatcatgtgagaacagagaacgcccagtaagtgtaaatccctaggctcaattgggtcgttagtgggacttgagtgacttctagtgtgattaatctataattaggtggacgagtagcgacagaatatgccactggtgcggttgacctagaatgccgagaaaatgggagttcgtttttgctttcttggacttcctataagtaaaattgtgtgggggccaatgaccaagtgaaaaaatagctagacgtgcgtcagttacaagggaagacgcgagttgaaaaagataaaaaggctcaaccttggaagtcatgaatggtcgttctgtgctgtgaacgttcctagccatcagcggcgccgttttgtagaagggtctagcatactgttaatttttacttcagttgaggagggaaacgaagaactaaacaaaagaagaaaaagttgaacaaatccagcaggggaacggcgaacatcagcctgcgacttgcggtctgaagattcaaagccgcgcaggtgaataggtagtctggaacaggtatggttcgttggcgacttaccaactaggctacctgggtctgcagttactaccgatgtatagccacttccccatgctccttcgcattatgattaccagccacttccggcaggaacatttcaacaactctgaatgagcttcgtgctgctcaagcacctcatgtgtgtctcatataattgctagatccatggaaggtctctatgcgtagatgaactctcggccgttaggccttcgttcttcagacttgattgccattggctttaatgccactagccatgcagccgacttctggctgattgtgacacagatgcatacagcaacgggtccttccaaggtttacttgactcgagaatcccatagttgatcaagcctacctaatctctcgaactaaaccagatacaccctgtcagacccacctaggcccacttgaacgttgcatattgaaccacttgtattacatgtgtaccttaactaggtaccttgcaggaatatatgcgtgctcttgactccaacagattaaacctgcgcagaggtacgatagtggccgtctaataatagcaaaggtggcgcgcagcaccttggctatttgtccaatttggtactgacgcctcggttttctaggcacctcgtcgggtcagtggacgacccatctatcgcgtactatcgtccatcaagtccgcatatttcgtcacagtccgtgcgagtaagaaggaatcagttgcaggctctcctgcaggggtatcactcaggatctgcccatagatgtgtttcagccatttccaacggtcttcacgcatatctcttccgtagtgatagaatgccctaggtcaattttgataaatattcaaaccagcatgacagcatgagctatactaagcttctacaagagagtgttttcttgcgttctgaataaagaaagtcagcgaagcatccatctaccgtatagatgtggggagcgaagtcgcttgcataaaaacaaggacagaaaatctatttatatcaggaattaacaagctaatgccggtaacgaaattacggatgtgatctccacgtgggatacggagtagtggttggtgatcgagtacccaccccggcgcttaagagcttttcttggatcagcgaaggttttcggatatagcagggataattctttggtcttgagaggggattacattgcgctaactacattagacatcgcgtaaaatctaggtgcatcgagcaaaatccaggaaggttccaaagttcggccgggaatattcccgtccgaggtcgattattcaacgctgaagacgactatagagactgatatatatagagaatactttgtttacagcttagaaaccatcttattgccctgcttgaggagaacagcggcatctccgacgagctcatcaacgatagccttggcaggcttcttctcgttgacaacggcggcaaccttgcccatcaggaaggggcgggcgttgtccaaagcatcatcgtcgacgtcatcgggcaagttctccatatcgtgctcgacggggatgatacccttagaggtgagctgcttgatctcctcgtgacggttctcctcccagttgacgatgtaagggttcttacgaacacggaggggacgaccctataccatctgttagtaaccaggacggcttaatactgacagtcagggaatacgtacagtgaatataatggtacggatgttgtcctcgaagttagaagtgcggacagcctcctggtgagcggcgggggcaccggcctcatcagacaggatgaaacgggtaccgatccagacagcggaggcgccgagcataagggcagcagcaaccgagttaccgttgaaaagaccaccagcggcgatgacctgcacgggctggccggtcagagggctcttcttgccctggaccaacttggcaacggtggggatgaggacggtggtggggacatcaccggtgtgaccacctccctcaccaccctgggcgcagatgatatcaacgccaacatccagggccttctggacgtgcttggggtggccgatcatgttcatgcagaggatgccggcaccgtggagcttgtcgacaacggccttggggggaacaccgacggcggagacgaaaagactagccttttcctggatgataatatcgacgagctcaccgagcttgcccttggtgtagtcgtagctatttgccgaaacaaaatgcgattagcacgtgcacgtgtcaacaatgggaaaagtgccgcagcgatcgagggttcttacttggtcttgcgggcactgccgccaacctgggggaggagaaggtcgacaccgaagggagcgttcttgtcgtgcaggtagctcttgagttcggcgacctgttcgcggagcatctcgggggtgtagccaacgccaccgatcacacccagacccccggcgttggtgacagcggcggcgagcttgggacccgcagccacgttcatgcctgccagcaggatggggtggttgatcttgagcagatcagtgattggggtgcggatttgttctgtacagtggtcatggttaacatcggtcttgaagccatgggcccatgtggagccatcagttaagtagaagaggatcacatgaaaataactggcagagtaaacatagggtatataggtcacttacgaggagaagccattatgaatatatgtggagtgaaggtgtaaaaagaaaacctggggaagagaaaggatggggtgcgaccaacctataaagcaaagcaacctcggtggttcacagacttgcgatgagcctcggtccacaggacttgaccgagagattagtcacgacgttaccacccgcggaggaagtgccgtaagcggggttggaatttgacacctgaggcagaaattcccacgtgtctacctaagaggactcgacttctacaacatccatggatacacagtggaggatgtcatattgttcaaattggcctctggtccctgtcatacatatactgccactcgactttattgcagccttctaaccataaataaaatgccttaatacttctgtctagcgtcgtcgctctagtctagcttagaaaagctttagagaacttcgctcctttagaatctagagtcttacttagtgattttggagaacatataccccttctagagtaccgatatcgtcctctgtatttatagtcggatagttttggttttccgccgaaatagataacattcaaggtttggtcgtcacgcaaccgtggaatcgaaacatatgatagcgactgctcttgacgctgctcttgataaattccaaagcttaacacgtccctatactcctagtatacctaatcacgggcttgccagttttggacgaattccctctttagaatacactataccggaaagaggatcggctatatgaaaaggttatacagagccttttaggttagcggagcccgaattagctaccatggctctaggatctatattaggcggcgggtagcagaagccaaaatttcaaaaggatctttgtcttcatttctatttcctccctgatacaaagtcttccaactatacaagtctcgtttaaccgtccctgaaaatgtcggaactttttgaaagccaacaattgaagacagtcccctactgcaacgaccgccctcctcaatacgacccctgccagccaagccaagatgtactcacctccgttattgagaacgtgcatacccgccggatattagtccaacgagtagacgaatggaacagaaaggctctcagcttatcagaaataactcccatcgaacctggttactttcaggctgcgaacttttgtctagagatgagtcagttctgtaccgagggggcgcagattgctacagagttggcaaatgtctataaggaacgcaccgttcgaaacatcgaactctataccgctatggaaagactcactgagagtgagtttaaccgggcctatgcttctctagggcgggatgcaaaccagcagatgcgacaccagctggctcaggaccacgaggaccacggcgactgctctagagagagtggatataattccaaacaaatagagccagctagagattgcacgtgcgattctccgtgctctcgtgaccagttcttcgagctgtcggcaaaggtggatgagatcaatgataaacttagccaaagccttcaatcccttgatacggccagtgtttcaaaggcgactcataatgctccggcaaagccacccaagagcttttggaagagaattttgaagcattcagctcagccttaaatggtaaagtgatacctggagtgatcaaattacgaccagactgccgaatattgatgtttatcttgctttctaccgacttgaacgatccatgtggatgcatgggttgcttctgtgtgcttttgagatttcaatgccatccttttctgaacttcactttcccatgagatagattttatatcgaagtcagaagtctgtaagtccaatactcagtccttcttcaaataactttttaaccctatcgtgatggtagatcaataaggatttactacaagatctaaccccggtggacaaagagtctacagtgaacagcgaaatgcaggtccaggagaaaaatcatggtgccccagggcgccggcagtatagattcagacatagtcacctccgaagaggaccagtcgaccaaaaagaataaagataaaatcgaaccaagaacaaaaaccaaaaccaaaaccaaaaagaaatcaaccaagaacaccctcccttcactctcacctccccctcacatctgcacccagttttcttccttcatctcacctcactgaggttctcggagagaagcaaaaacggtcaaaaaacccagaggaacgccacaaaacatcacctcttcgtccccaatatatatgatacttccattttcattcagctcacctcgctaaggttctcggagtgaagaaaacggtcaaaacaagagaggaacgccgtcgactgaggaccccttcatgttgagctttgtcagctgaccaactccttgcctccgtgcgcggcggtccggaaggaggtcgcgagggctgcggcgctggcggggtctagcctcataagccaggggctggcggcctcggaggcgcgcgagccgttaggctggcgggagggggaggcggggcggcgcgaggcagggagtacgtatcccggggggaccgggacgaacctgacaccctcgtcggcggcgggcagggcgatattggggccttccgcctccaccaagacgcggagggggcgactgttgtcgccttgatgacccacaatcgtcagcgtttactactacggcgtgggggtaatgataaggctcttgagccgtaacttacctgcctccctcgctcggagccagtccttagtgagggcctcttggggacttaagatggccgtagtcctgtcatccaatctatgccacgagatgtcagccaatatgtacgaagacactccaaaagagcccctaaaaaagctcccaaaagacctttcaaaagaccttccaaaagacctttaagagcttctaaaagggcttctatagggatcatagtctttaacttacgggatctcttcagtctttgcgggagcctcggccccctcctcgggctttttacccttcttcttcttcttctcgaaaaagaagaagaagataccgccgcacaggaaggtcacgacgacgaggattaccccccaaaggggtgctggcagtttggccaggttgttgatggcggagggggtagaggggacagcggagggaggaggtgtggggagcacggagggcacttgcacgagtgtgcgaaaggtcatggtaatagtgtattccataatgagaatgttgttggataaaaaagcatctagggccctgatggaaagacgatgtaccttctacccggtaggttcgtgcctaccaaatctatactatttacgtcgtaactacgtctatagcttcctatttcacgaagacagtccgctctggtcttacggtttgatctgtttgatctagatcgatagaagacctagcaatttcagtgtaggatagccttgaaagtagtagttgtatatcttttaacgcaccaaatttagcacccttctctgcaatccttgggaaatcaacgatcataattgaaattttcttggccaaaccaaatgttaaatgggagattaaagcgaccgtagtaaggttatttgacaggaaacaaaagacgaaagtggttgtgtccatcaacaactgatagggagcgaagggcaagaacaaccatggctgacctatctgctattgggaagggtgagagagaaggagaatagttcagttatggggaggagagaagcaaggcctagtatatgtttaatgcagtctcaacatcttacatatgtatcttaaacttcacaagtcccgtgatgttatcgaacccaaattcgctgcccacgattcatagaaacggctacgaaacccccgataggttaacgacaatagcaaggaactctatcgagacgctcagggcgaacaagacgaacgtcaagtcacaactacacccaaagagccgagatatgttttcttttttcaaacacattcttgtattgtgctagtgatacttgataagctcactgctgcatagtaaatattgacttctgcagaagtttatatacatatccaagagtgtgtcaacaaacccaaggcagtaatgttctgcaaatcataaagaaaaataaaaaaatcaaaattccatcggtcctgccggttttaagaagaaaagaaaaaggataacctatcccagagtaagagtgaaaccagcgctcagagagcaagagtaggtgttcacgtcatccgggagttggtaggcatccttgcagttcgcatctccagcggcacaagaaaccgacttgcagctcgagtcactgggctgaacagtgaagccagacttgacaaagtcggaagtctcgtcgagatcgatggaggacatgtcccagaacagtttctcgccatcctgggtgtattcgaactgaagaacgctatcctgggactcgctggtggagatcttgatggagataccgccaccgttggagttggtggtccagtcttcgctgtagtcacctccggtgctgagagtcttcatgctaccagggtcggacgcggtggtccacaggtagacgtcggtacccatgttgttgacgatctgaagaccgccactgccagagtcgcgggtctcaacggcgccggattctccggatcgagcggagtgggggagggcagcagcggtggcagcgagaaggccggtaaggaagacgttgaaagtcatgatggaagattgtaaattgagggagtgaatgtggtaagacaaagtagttcactggtttacagagatactaaagtgacagtaattgaggatcaacctcgaatgaatgaatgacttcaagaagagagtgacttgaaggatcaatgaatgtgtttgaagaaagaaagaaaaaggaagccatatctgcggacgtccatctttttattgcgcctggtggagtcgtccggatgaggatgaaactttgcgagaggaccaaaaggtgtgtagggtgtggataaactacaattatagatgcgggttcagtcaataaggttgtcttccgaacgcaaccagccaatcagaccatgcggctgaggtttccacaaacggtctcgaacgcttcgtcatcttcccaaggttgaacagttcgtcatcgtcttgcgagtggacttggcgttttctagaatttcgattcttaaacttcagatcaatccaatcattcaacgagtatggttcgcaaatagaacactttgtttccactccgaaacaaacccgataggaaaaagaatgggtaccctgacatcagttcttcatggctcccaagattatccatgcatccgcagctgcccggcaatataatagagacgcattttacgtcagttatctgtggcgacttttcaactgggcattgtccttttcgcctagagaaatctacaaccaaagcagctgattattaaaatgtggtgacacgacctccggatgctaactatctactaccgaagagctcggttaccttctccgcaagatatgcacttttgagttcaacgctctgatcttttgtccgacatcatatgttctatccattcaagggtccaagtcggtccatataatccaccaactcagccacctttgtggccacgatattttgtggggctatcaatttgacagtgggcgccaaaattattagccagtgcttgtttctcgttgagcctcgtttaattacattaaaagtgcaaggggttgcggagtactttgccacctggggcaagtggatatgtcggacaatacatttgagtctaagcttctcgcctttcctgcctttcctggttattccctcgtagaatgtgcctatggcgaagttcacccaaaccagggacacttgctggctgtattaaggggaaaatgcgaatgaaaatgtcaaataatgaatctttttccttcgccttctttcttcagtagcactcggtcacaggaaccaacaaatgggaagacactacgtaataacatctgcgacattttggcaacttcttgctaagcctcgtctcaaatcccttcaacgtttgcctgaaggtcctcttgtgcaatcatctggcctggctcaaaagccgtggcaaatatcttctcaaattcagtatcggagagaaggcgcactccaacaaggtcattatccaaaaccttgaactcggcttcgaatttgccactcaagagcgcagctttcagcagcgcaagtgctttgaagaggtccaggccactctgcttggtatttttgagaatcgtctcaagctcagccgctgcgtccactggattctctatccatttgacatcaggccgcgagtacttctttgccaaattcaagactttgttttgagtcaggacaatgtcgtggacgctaaccaggcggtttttcgtctcagtagcattattcaaagcaccagcaacggcttttgcaacgctcgacagactagttgagctgaaagtatgcacaccattgtcatagactggggcagtctgagtctgcagatcggttaaaaacggcatcgacatgacaaattccaagaaggggccaacagcaaagagtgtgtactcaatctgtccgctcagcgccttctctttgagatacttctggatgtctatccataaagcgttcagcggaagtgtctcggctccaggtctggtggtaagcgccccaaagtcggaagggatgaagcgtctaacgccagccttgatgctcgcatcgatgaccgacttctgtacgctaataccagatgttccgacggtagatacaatggcatcctggccccggagaacagctacaagactgtcgatagatgaataatcgacttgcacagtcttgatgctggaaggcggttcatccatagagcgagccgtgcgactcaacaccgtgacttgaaagcccgtgttcacgagctgctccaatattgcagatcccagccatcctttctgttgaccgcgtatcagtataacaaacgtagatatttcgttgccactcaactaacccctaggagtgcgacattccggataggctccatagtagatgaaagtgatgtttgaagcgaagtttatatggagtgagacaagaaagagaaatatatttccaatgtgatgataacaatatcgaagacagtctcgccatctttcttagctagaaatgtgacggaatatatagttctgtgtgtgatcatcggcggtgtctatattgggcaactcattcacgaaatagcaaataatcagactctactgtacgctctatactcattcagacaagtcactcgtagtatagtgcaaaagctatcccacttccatggctgtgtcggagatcagcgggaaggtaacagcaaggttcgcgccatccccatttaggtaagtcagtcgtggattagcgttctaagcttaaccaattaggagccgtttgttctaccccaccgcctgggtcactcaaggtcaactcaagactcgcaatatatctgaccgtctctctaatgtctcgatagccgcataaatatacaccgtgggtcatttcacatctgccaacagaccagcttttggtgcccaaggggcagtgctggtaccgttgcaacgttcttttactggatcatttttggaacctcattctgccaccatccatggcatctgccagagctagcccggcttgtgggaactgcagatctaggagaatcaaggtttgctcaccacttccaaaacacttttatcggctttgttctccaggctaacctctcgatagtgcaacctcctccgaccaagatgcagccagtgcgctcgagctggtctagactgtaccggttataggtctcagtcagatctgctttttcgtgatcagaccacatcgacaattcggaggttgcatgcttcaagtactaggcagaccacggttaacaagcataccacgtgttggagcccagtcgtaaccagaaccacttttcacgtcgaagaacttgcacaaaaagtattttctgacaactttgcgattttgggtggagaatgcaagaagtggatggtttccggcgcggagcacccttcttccgtcactgtcagcctcacctctgttggcctcgctgcacttgctgttgtccacaaaaatcccgatatgatggatctggcgcgcagaaaatacaactttgccataaggatcctcactaaagcaaccattggtcatcatagcggtgggattgaacaatctgtggctggaagtttcattttgtctatcttcgaggttctgtgttctgaaatcccactaatacaactttacccaccagactgacggatggttggtgttgcagatgataacatgtgatagacactcctcttcatatgcctggcaaaagcatgtccacggcgctgccgcattcttgggctatttgtgttctaccaacggtctaccagtctcaccggtgaaagaaattatagagatatgttacaccacggtacgttggaatgtcattagagcaaggaatctactaacaactcgtactttcgagacactggcgtgtcttatcagtggcaagacggttccgcaattcttactggaattaccaggtcgctttggagcgtcatcaaataccccacaagacgacgaggatcccttgttatcagcaatgagactctttactattttgggtaccttggtgaatagtcgtgtgctggccaaccagagcttttccccacctgaccagctagttgtactggctataaaaagtgatcaaaccctccaaaactgggcgacttcacttcccgcgtcgtgggcgtatcacgagcttcctaaaggcccacaatacatttaccaggacgtttggtatgctcgaatgtggaactacttccgcctagcccgcattttagccaaccggataatcatcgacagttgcgacatgatggtccccgcaatgcttccaagtgatattttcaagctacaacatgcccagtcatatgccgctattacgctcctgtcacaggagatctacagcagcctccctttcatgtttaaattggaacaagtgcctgctacctctctaccactctcggcagcccttttcttcacagccactttgttgcaatctctactgggacttacagatagagatactctcattcatgactggtcatctccagcatctgaggtcctaggagaaagttttacttttacgaagggcatcgtgatgcagaatcttcgctaggcgagggagatgatatatattacgttgaggcttggcggcgtcggaagaagaaccggatagcctaagattcttagtcggtgttgatatattttcccttgggcatctctgcagattcgtcagttgctaagaacacctgcaacgacagctgagtctccatagcagccttggtttacccgggtggactggtgatggatacagtgaggatgctagccagaaaaactttgcttcctagggctttgcgagtcttgcatatttatctccagggatatgttagttgaaagaggtctaagctgaatatgtattatatgatccatatgaaaacctcggttcccatcgtagccctcctccttcatcttgtcattcttctcatccatccttctgacccttcacgtcattatcaaaaccatcaggctcacgagaggaccactcgtgagcagtatccagacattccactttcactcccacacactgtgagcaaatgttaaaattgttgcaatcttcacacctgcgatatggagtatccgtcggtataggcagggtgcacacatcgcaactctgcgactggtccaaatcaacgaaagaccatggcttgtcgttactaccttgggtgattcgagtcccaaacttttgtgtatactcctggcgcaccatgtcaaggactcgaccacgcccagtccctatcacccaccagatcaagtcccgaccaagtccatccaagtttgactgccgccccgctaatgtggtcagcttgtcaatggcctcttcatgcccctttctcattgcggctggcagtggcattgcgctataccggtccttcgcatttgcagggaggcgtggaaggagaagttgcaccgctctgctggggcctcgtgcaataacatagaacagtggcgcgcatcctctttcaacgcgaatgtcaatcttgaactttgtggaacgaaggaaattggtgatgacttctagttggtcatgtggtggtatatagcgcaagagcctcctgtcatcaaaattcccgctctcgatggccgcgcccctctctagccgcagattaacaacgtccagatgaccagacaccgaagctatacgtagcggagtccccatatagaactccacactgtcgatgtccgcctctttgtcgagcagcaaattgacaacatcgggtgagtcattcaacgaagcaaggtgtaaaggcacgacaccaccattcgccacactattgagaaccgcacccttatcgagcaaaagagtgacagcttctatagaattaccgagtacagcaaaatgtaaagacgtaaagccgtctttgtccacactggcaatgtctgcccctctttcaagcaatagagtagcaacgtccacagagccatgccaagaagccagatgaagggacgtccgaccatcaggtgttgcgctatcaatacctgcccctttctcaagcaataaagtgacaatatcaacatagccattctcagaagccagatgaaggggcgtcataccatcaggtgttgcgctatcaatacctgcccctttctcaagcaataaagtaacaatatcaacatagcctttcccagaagccacatgaagtgacgtccaaccatctgatgttgcgctatcaatagctgcccctttctcaagcaataaagtaacaatatcaacagagccatcccaagaagccagatgaaggggcgtccaaccatcaggtgttgcgctatcaatagcagcccctttctcaagcaataaagtaacaatatcaacatagcctctctcagaagccacatgaagtgacgtccaaccatctgattttgcactatcaatagctgcccctttctcaagcaataaagtgacaatatcaacatagccatcccaagaagccagatgaagggacgtccaaccatcaggtgctccgctaccaagagacactcccttgttgaccagtatagtaacgatgtccaaaaagcctctctcagaagcgacgtttaacggtgtgaagccatcttgattggcggtctcaaggtctgctccgcttaaaacaagggtcttgacaacttcaacgtgacctcggtagcaagcacaagagagaggcgtccttccaaattcatcttggacgttgatatctgctcctctctcaataagaagccgaacaatgtctaaaagtccttgatctgaggccatgttcatcggcgcccatttgaatgtgttgctacggttgatgtctgcacctttatcaagtaattggcgcacaacttcaatatgacctgtgcagcaggagttgtagaggggtgtattcccatactcgttctggacgttgatatctgctcctctctcaataagaagtagaacaatgtctagaaatcctctgtaggaggcgacattcaccgccgtccattcgtcttggcagcaatactcgatttctgcgccttcatcaagcaataggcgcataacctcactatggcctgcattgcaagcgcaataaagaggtgtccgtccagacccagtcgggacgttaacatttgctcctttttgaataaggagttgaacaatgcctaggaacccgccatcggaggcagcaactaggggtatccatctgtcttgtctgtcgatcatatctggttccctttgaaggagcatttggaccacctggtgatggccatttgagcaggcacaataaagtggcgttttcgatccatccgatccattgtgggtattaaggcccttctcaagaagcagttttactacttcggcatgcccattgcaagcggcagcttgaagaggggtgtgctcattatcgccggcgatctcgagatcggcgccactgtctaagagcttcacgacagcctccaggttccctctttcgcaggctgctactaatggcgtccgtccaaacttcccctgttcatttatagagtatttattgcttcgcaagaggaggtccatagtgtcagtcagaccaagccatgcagcgtagtacaaagggctcatggagagggtctgggcaggttgcccgtctttaaataccgataagtccgaattgtctgcacaattggaaggccctatctcttgttcgtcatcagcagtcgatgagtctgaatcctctccgctgtcgacacatgttattctttgtgactcatccctcgagtcgagccattccttccacgaggcccagtttgggttttcgacatcaaaaagctggttcagagatttcaccaggtccgagtcacgcatatttccgagagaggcatgctgataccatgatctgctagcgtaattccggaaagactcgaggacctcgtctcttccctcctcagaggtttcttgccaaactccttcgcagtcaacgtaacaaagacacatcttggcagccaaaaggttctcaattccttcggtagaggatttcaagctggagttgaattgtagtaatctccctggcgctggaaggttgcaaagcaagtattccttgacagtgaaatgagccaaatgtaccgttctagacctagggtcatatcctgccatgggatttcgaatatcaatcaatgacccaccaagtctcattatttctgtttcgatgtagctatcgttgattctatccgggacctcgtcaattctgacctcatcgcaatttgcgctgatcgatagggctccagctatctcagagaccgaaagcggccgaagggcaaacgcggcccatcgtagtaaagagatagtccgctccctattatcgtcggagagaagtgagattcccatccattctcggtcgtaggtcttgctgagaccaggaggagtggaattgattgctttttcgagttgttttggacttttccaatcgcgcagctgactctcctgcatctggacccagagaaattgcccgttacaacgttcagccaatttttgagaaatatcgctctttgtcgcctccgtcattgtggataactttttgttcactatgctccgtgaaaacatgtcgagatcgaaccggacgtcctcgggtgtgatactgtgctgaatgataatggtgtcgttggtactagacttgttgacaagacaagcccggatctcaggctcatcacgactcactaccaaaattcgagtagatgtaccatagattgctcgttgcaatgcttccaaaaagtcaacgattgaagcaccatcgttggagttatggtcctgctcaacccatctacattcatcgaggccgtccaagataaatgtgcaatgggggacctttatgacaagatcacgcaaaagctttagagtatcgccgcgagttgctctctgcccttgttgcattgtcaatctctcgcgggctaaagaaaaaaagacagggtgacataacaactgggatagccatatcctaattgcaatgaatgggtctcttctgctttcaaagtcggacgagaagaaaaaataagcaatggggcccttcgaattggaagaaacgttctcaataactctcgcacatatgactgacttcccagagccggcatgaccattgatccagaggaccttagcacatccatctgggaagtctggcgaggtccactcgaggaaccagggttgatgcaaaacccactcgcaagtgccttcaattttcctctcggtaaatatctcgtacagatcattcgtagaggtagatccgagcagccatgcatgtaaatcccgtctatactcatctagaaccatgaaccgtgagctaggaaaaatgaagggaaattggggtggggacaaccttccatctgagtctccatacgctttaacaggttttcgagttcagttcgccatgcatctgtctccagtactgtgtctgtagagccaaaaagaatgttgatgagttttccaaattcgctacaggaaaacatggccactcaccgccagtaggcttccttcccttatatccctttagatcctcgattggtatcaagttatggagagtttccaccaatttggagaaatgatcaacttgggcgacacgcttagctttggttctgagtacccatccaattttctgccgcttggattcgcggggagggtggcggtggaacagctggtcattattggatttctcatcagctcccagcatcggtgtcaaaaacgctttatcttcatcacggcaaacagcattgattgcgaagaggacttctttgatagtagacccaatttttgggtcgtcaagaaggacgttatgatcatacgagagttcatcgtcttccaggcccacggccagaccccatcttgcgagtcgaatcttttgagctttaaattgggcgacaagagcgcgaaactcgaaatcgtagtctttccacgaatcgaatctttcaacagcgtccaagcaagtactgaaaagacctgctagccctataatcccgatagcaaagctgacaggctccatggagtatatacctaggcgcccccaggtgtttcttgtattcccaaagttgtgatgatccttggtttttgtcgggtagctgtggggctgacggaggggcaaccttggaacaacgctcttagccccgaactagcggctctttatataagcaagggtgacagccctggagcccctcgggagcactttttcgacctcgggagatcacaaacacctccaaaacccaagagacaactgctggaatgggggtgaagtgtcggcgacacactgaacgattcccatctttacttgagtaaggtctagaaggtcataatgacatcgtccatgaattgcctagccgggccgtttcctaagataaatgcagacgggtctttgagaacggccggtatcagctggatttgcggcacccgtgagttagcgaatgcattatgttgttgaccgcttggtcgctgattatagcatataactagcatttggtatttcaaattcgacttaaatattgagtactaaagtgaccgccttcagcgatccggggaagagccctgcggcctcttgaagtaccatcccacataccacaagtgggtccataaatgccaatattccgatctacatcggagtggttgagagctgctcgaggaggcgcagacgatagattatacattgctatctgtgagcactattcgacccacgggttattagcaggatcccgagcgacatgcggcttgtattgtctatttcatcagccatctaaaggacgaagaaaacgaatgtgaatgaaatcttgaggtttagccaccaggccatgaaaaggcaaataccagtcttagaaccagtcgtgaacatgaattttcggtctttaatgtacaatgcttcaaaccatagggcgcggtattaaaagcgagggggaagtaggaacaaaacgggagcctccgtgctatgtcgtttaggaacaatgatatcaaccgaacgcctgaggagagagagagagagtattgatgcgaagattttgttatgaagacaaaggtagaagggaggatatgttgatggtgaccgaaggaagatatgaaccgaggagggaattcaagcgtgggccttctgctccgacgcagggaggggaggaagctaataatgtctatggttagcagacacgtccaattgtatacccggaaggtcacaaatccaacttacctcaagctttgtgttatcggccatcatgcgctggaaaccaataccgacaccctcgatgacagcgaggaagacggcacacataatagcggagtttcgggcggccttataaccaccacggatagcgagggagccaccagtaaagaaaccagcaatgatagcattatagggatcttccttcttgcggatacccttaattgaacagtcataaatactgaaaagacctccccaacagccgaagttaccgccgagaacgggggcgcgggctttgattgctgtgagggcacctatccggcgctcgccgtacgggctgttgcggaatcccttaacaccatgccagacagcacctccaatagcacccatagcgaaggcaccgccaaagtcgctcagggcaacccagggacagggatcgcgcgtgtgatccatgatgtgtgaatatggtggacaggatgataattccgaagaaaaggtggatcaccggatgaaaaatagtcgtgaaaggcgcgagagtgataaaggtcgaggatgtattaacggcaataaacccagcggtgacacgagataaggtgatggcttaagaaattctagatagggtacacgtgatcttgaaaagatgtcgctggcaggtttgcaatgtttgcatataattgatgcctcgggtgtaaactggtatcttttgccctaggtcatgtgacggccttccgcgatatggtggcttgacttggcgcatcttctcaaacattcactcgtcgtggcaatggagagcaaagatcccctaatcctgacttttcgcgttgcagagctgggggagtggagaccgtcagtcctgctaccggtgattgaaccagaatttggggcgcatctggaggttactgccgaatccttatatgtgtgggtggctttgtggagtagattgcacaatttagaacgagttcttacatgtcgaggcatatttagcaacaaattacactccaattctgggggtgggctttattcggtgggttacccacattatgctttgtctggatgtcgtcgggaccagggtacttaccgcaagtcctttatttgctgatttctcggatggcacaattaagcgcatgatagtgccatatgactgagtcatgatgagtggccgatgatggctgcttttaattggtccaacataccaagagatggcattagaatcaatacttcatcttgaccacccgcttgtcgccggattccagcgtccctcataatccttccgtcaagtcaacacagagctatggctctgttccacctgccgtactaatcgaatgcactcagagtggaaccttgaaaggggtctacgaatgccgacctttgcaaaactaccaaatggtagtagtcgcatcagctaaacaagactactatctactcatgacgccgatttgcgaacggtgagcacctccccaattatattatccagctgtcctcctcagagtcatcctcccaatcatcccccgattcaccttcgaggtccaaaatatcatcgtgttgaaaataccggtaaacccgggtggtctggttcgtgtcggtgattaacaacttcatcctcggcttggacgaagtctggtttgcccgtatgacccaggtttgcagacaacggaccaactgctccagatcccccaccgcttcgtccgtctcgtacgatgagatattgtcaattatgcagattatcgtgattcccttcttaacctgggtaatcaacatcccgagaagccagcacagtttcttcaatgaaaactcctcgatccgtgataatgcgtgtttcgtgatttgcgaaaggtcaaattggactcgatgggagtcgtacgagaggagctgaccgatcaagctggcgattacccccgtggcaccagcccggcgaccgatctccgcgcgactggccgtatggagcgagcaaaagtgagtgaggatcagcactttgggatcgggagcggactcgtaagcgattcttgcgcagaggtgtgtcaaagccgatgtgccatcttcagagtcaaagtgaccttgaaccagtagggaggcgtttttcccctcagtcttgttgatccagttttgaaactgggcggatctcgtaatgaagggaagtttttgggattcgcacttgttgaacctgcttgggtgaacgttcgtgccacggtcactggcgaccttggtttcgtcgaatgcgaggaggtgcaaaaggccttcggtggtgatcaggggctcctcgggcttggggaaagattgatgtcggcgatgagtccgttggggaacgtttaaatgatcgttagattgagaattgacacatagggtgagcaaatctcttagatctggtaggtcggttatggatggactccgcgaaggctggatccccggggaagggtttgcactgatagagttttgaagttgaacgccggcgagagacaatcgaggggacgctagattttcatttttcaggttcagatttgatagaaaatttgacagttgcatgatactaaccatccatactgtcggacagaagttcgcctttgctatcgagagatgggtgcccagagtagagcacgtatagattgacataaatgtccgtccggctaccttctatgttgtgagaactctgcttgatgccttgaatatcttcgttgatattctgtatagtttggtggttcgtcagctctgcctctcgagaaagagaggtggcgcgctccctgaggtcggaaatcgtctgtcgtagagagtctttcgaattcggccccttgaagaccgtcgaaataaaatgtcctatgcaaagattgaaaaaacaaaaagaaaatcagagacgcgaccttcccactctggagacagagcaaatatgtgtacttactagactttgattcaagacagtaataaacgatttcccgcagcacaataagaacgtggttacaaaggtcagccatcttttccagcatattaatactcaacctaggaactctgtacgcatccaggtagaaccgggcttcgtacaagatctcgggtatgtcggacagtgccacgaaaactaagctatccagcttgtgagtttcatcaagggcctacatagcgtcagtcggagcttgcgggttgagaatcaactcgatctggaatgttcctgctgtcataccgataacaatagcttgagtcctcctgtacaatcctcgcttagcatagatcgtgtcgaatatgatagatgcatacgtaccgcatatagtagacccataatccccagctggaagcaggtctagccaccccttcagcgactccgtatatctcccgaatttggaaatcgctttgccaatcggtccacctccatgacgggtcttgtagtagttctgggcattttgcagctccttcatcacatccgaccagtgtactttctggtccgatggcataggctggctgacttgaaattggccaggtttgcacaatttcagacggaaagcgtctagcgcctcatttaaggcctgaacattgttggtcgtgcttttgaaagactcctcactaacaaaatagccctcgataataagtgataggttccgggattttcggcatatgatgagcggaaggtgaatacacacacattcgttgcttacactctagctcatcctgggctgcgtccttctcggggaggaaggagttgatgcgatgaacaaatttgattttttcttcgtcttcggcagtggtttggtgattctcaatgaagctcgcggggatattagttgaatggcggactgggaacttggctacgggttgttttgccatcctgttcgtggcctatgttgcctgaagaaaacacaaagatgttcttagttagctggtggtgttatggagtgaccaaaccctcctatgcccctgccagttcaagagtcaggtcaactccgaccactaaggggaggaatggtgaggggtagggttgagggattatatcagatcaatcattggcccgaagtcccaagtactccctgtcaagatcatttccacgtcctttgctgacactcaaactaaatatagcgcggcttggcggggacattcgatcggccgcagttcatcgcaccacgctagaggggagaaagctgacaagtatttgctgatggcgagcaagggccaggaggtatggtaaaggaactactccgtattaggaaggatttatgcctagtggagacacgtgtatgtgcagatggggcgctacgaccaaaatagagcttcccccgtccaagtagttccctctggtccggccaatccctagtagctgcagcacgaggcgctgggaaataggcaaacaattcgagcgcaaaatattagttgccgaaaaggatgtccgagcataaaaagcaaaagtctttctggcggggtgagatttttcagctgccttaaagcaaggctgacacgctgacacctgttacagtacggcgcgtgtatatgtgaggtaaactggccagagtatcgcaggtacaaatcagtgaccaactcagtgacctcggaatttctccgtcttttcgaaggcccaagaagcatcgcaggagctttcgcatcatggcaacagcgatcgtcgacagtgtaaatcctcactccttcggtctatcttccgaaccgagtgtcttcacaccagctgcggacagcaagacagactcgtctcagactgaaaccaacaccccgtcttcctctttatcctctgatgcggtgaagaactgtcaacccagcaaggcagaggatgagcctcaaaattcccaactcaataagacaaatgaggcagaacctcgactcgaggatgcgaaagatgatccatggctccttcgacactggaatagagccaccacagtctatgagcagcgttctttacaagagcgaattcaagacgtcccagcgcgactttttcacgaagcgatgctccaccgactctttcacgaccgtcttgaggcactcgaggctgcaattcttggaccgcagaaactggaccctaccaactacaacaaaagcaaggtgcctgatagcgaggctacgaccaaatgcctcagctggcaagagtactccgttgtatacgatgtacccgattcgaaaggcgagtggaagcacgtcccggaaatcgacaacagcccacagagcgtcattgagactctaatcgaagaacctcaaccgttcagaggggcgcggtcgttcacaaagaaacagtcccccgggggtgtcgctgggaacaaagtaaatcttgatggcaaagaggccagtcttcctatctttcagattcggcttcgctcgccagttcttttgaaggtcttgaatgaagtcacggaccagctcccgcatcgcggtccccacgagcataaagtcaccttcgtgaggcccttgaagctgttgactctgttctggaaggaactcttggaacatcaaaagaaactcgaacagatccatggtgacagcacagctgaaagccaagtcccttcaacggccattggcccattaaaagaaacggagagtccaaaggcccttgaacatctacggttattgaacggatttatgtcggatcatttaggtcgtgtcttcaagttaagggaggattttgagaagggcacggctcgcaaagtagcattctgtgatctttggcatctgttccgaccaggcaccaccgtccgcactcccgctacaaaacagatccaactgtgagcctttcaactaaattggaatcatatgatgaattgctaacgcgaactctaggtatcgagtgattcgggtaacgggagggagaccgctttactccacttccacgtttgttgaacccccggcaaaccatgctggggtcaaattgaaggaccaaggatactccccggggaattttatagtggagtgcttctacattgacttcgatggggcccaatatggcccagtaaaccgtacattccagatccggaagtatgaaggagagcgagatatgactgctctcccggtatatccattgcaatgcgatccgaaccatgaaagcattcgtgaagcgatggtcactcgaggcgaaaacttcgcagttttatcgaacccacaaaagacagcacataagcaataccatggattaaccctggataagcatccggaacaagtggaatctcaggtaatcattgatttccaactggcgtttctagagatgtcagacaacaaaccacagatcggactggataatctagtcgatcatgacatccgagagacaaacttgggtcattggtattgtactcgatgcgacttagaaggctgctgtgggaacgagtggattgccccagactccgtcatcgacgaaaaagaagaacaggaattcaaaggcctgaatgggagcttaatggactccacggggtatgcggaagacttgacccgagaccagaaggccctacttccctttaaggtctatgggttcgttctccgttctcgcaaatgggcaacgttcgacatcgagagcattagcgatgttcaatataccgatggttggcaaaacttggttatcaacgacagtattaaagaaacagtcttggctatggttgaaaatcatgagagtattccaagcaagtctgaagggcgagagggttccctgccctctgtcgaccttattcaggggaaaggtaagggtctgattattttgctgcacggcgaaccaggagttggtaagactagtacagctgaatgcgttgccgaccataccaaacggcctcttttcccagtcacatgtggtgacataggagacaacgctgaatttgtggagaagaacttggagcggaacttccagcttgctcataaatggggatgcgttcttcttcttgacgaagccgagtttgttgcatccttccaatctcgagttcttcatcgaggctttgctaatttcacaatagtgtttttcttaagcgacgcaatgataccgatctccctcgcaatgcgattgtttcaggtaggtccgtccctccgtctgttcattttatagatgatattaattgcaaattccattgcgaagttttccttcgaaccttggaatattacagtgtaagttcaacgcatccaacagtgatactctctgagtctctcctaacccagataggggatcctattcctcaccacaaaccgcgtcggccaaatcgaccgggcattcaagtcccgaatccatgtcagtctgtattatccgaaactggacaagagaacatccatccagatatggaagaacaacatcggacggatcagaaaggagttcgagacgcaaaatccggacttcgatatccgggagaaagaaatcatccggttcgcaaaagaacatttcaaagacatcaaagataagaacctgctcaactggaatggaaggtactgtacaacttgccgtcattcattccacacactcaacccaaatctttatgctgatcaaagccctttatttgtagacaaattcgcaacgcattccagacagccgttgctcttgctaccttcgacgcacggaaaaacaaacgaccaagttatatcatcctcggtaaggaacaattcacccgagttgccgccgccgccgaggaattcgacagatacctcctctcgctcagccagggaaagaatgattcacaactggccgaagagcatcgctggcgcgccgataacttccagagccaacctatggtggtgcctatggtacccaacacggatccgggtcgctcagcatatgcgtttgggcagccgagtcgttcttccaaaggccgaggccctgagaggggggtgtttaaggagccggagccttcagacactgattcggactcgagtacatcatcggataaggaagagtccagtgagccagatcgtcgacatgctgaaagcgatgagagctccgagcctgaatcggacttggtatcatcggaggaggataggaagaaaaagcgtaaaggaaagtctacttcgaagacaaaggatgggaagaagaggtcgagtcataagaggtcgaagtgagagcttaattgcgggtcgtcatttaaatatctacagatatcatggtcatagacagggttctattcaactaaatcccttttttgatgtattcttcaacatgatctagaaattagaccgtatcaagctggcattctttgacctcagactcggtctcatgttttcccagtaaagaagggatgatacctcagttgttggcactacctaggtgtgtcttccatacaaagcacacttttcacttgcccgcgcattctggtatgattgctgctgttttggataccctcttgccttaggctgaggtgggtagatattgattgggagctcgctcctctctcttcttaatataactccctctgtaagcgccaaggctagaaggggagaagattgtctcactatgattatgccagcgaggctatagatacttggctcacctacagtagtccctaacagttgcatcatccaaaccaggtgcagaggactagcacggcgtttccaattagacaaaccataccggagtactccgaataccaagagactagacggcgtggaggtttcacactagtccgcacctgagcttgtcgtgagaataagccgaaattgagaatctcacacgcatgagcatggacggcctcagcgctcgtggtccgtactcccttgtagtcttacacaaggattcatttcatgtccctatcaatgatctgtcatcctggggtcccgatttcaaagcatccgtggaggagcatataagcattattaatcgcctatagggtacctaggtatctctcaatacctcctatagctggctatttaaaggcggccgcaaacgtgaagctagctactctttctctctctattccattcatcaagcctattaatccaatcacaacgctaccagatacgactcccaccggaattttcctatcatctattctcagtcatgactatttccgacgacactgtcgttttcgttaccggtgctagtcgaggcaagtcctgcctaaacttgcgttaggatcgcgctgacggaggataggaatcggacggacgttggtggagaccttcctactccggcctaagcacatcatcattgccagtgtccgcgacacagccgcagactacgtcaaggagctagaggccttgcccaaggctgatggttcgcgtctacagctggtaaagattgaaagcagcaactcggccgaccctgcggcggctatcaaggatctcacggacgtcgaccacatcgatgtggtggtggctaatgccggcggagccggcgagaaaggcatgattcccttagacgtggtgagctccgaggctgtgaccgacgtgtttaccgtgaatgcgctcgggcccctagccctgtaccaggccgtcaagcctttactggagaagtcccaggcccccaagtgggtatcggtcagcagtgctgccggttccattggccgacttgaggttcacaaggctcacatcgttccggcgtacggaatctccaaggcgggtttgaactggatcactacgtaagatgctgccagctttagcttaccctggtgggaaagaatcggctaactccggcggacgtgcagtgctatccacagcgtcaacaaggacttcattgcctttgccgtgcatcccgggtaagccaccagagagaccagccggatgggagattttggacggcagctgaccgtctaacagcctcgtgcaaacagagggcggcaacaagggcgcccgcgcgatgggccttccccaggccccaaactcccagcgccagagtgtcgattccattctaggcctagtacctgatgcccttctctgttttgaagcttgaaggatgcagactgactcgtgcagattgataatgcgtctcgggagacgacctcgggcaagttcttcaacgtgattgatggtacagagatcccgtggtagaggccgcgacagcctcgctcctatctgaaacgctcagtggcgccattgaaactcttggtaatcctctcccaaagtttctcaacaagttttaacaaggccagctgctgtgatattttaatccaggcagcttcaatggacagggttcgctcctcgatctcagagtcagagttacgaatgcttctatattttgatacaatgatttttccatggtcagcaaagaagaaatttgcgtaatctgaagccatacttcaaacagagatcaatggtgccggggcccgggggtacgagagtattaggaaatgcacggacctgcaaactggggaagatgtttgtttggccaatccttttcagccatcactctccttctctccttctctacctggtctcgtacagtactttccagacgtccttggttaatacctcttcggcaagctttgtctataaagtacggcaacatttgtgtttattctttttctaggacctcagcatcaatcgacatgtcatccattagcctgcctcagccgcacctcaatgaatcgatacaggaagttgacgaaagctactggctaatctcaaatgcggttcttcttactcattattcatcacccctcctagacaataatccagccgaccaagcatgctggagcgacggcaatggggggcctttcgctctctccactgcacctgagcctcttccgaattctaagcccctcttagacgactcatcttttatttcgagagttcacgcagttgacaaccaagcggctgtctagaaggcaggcgaagcctttatccaagcgcatcacatagactatcccgatataaccagagagcatatgactctacaatttctcaaagactaagaagatcaagaaccgtatgattttggattcccgaatgtcctctatcatttcgagactaactcgcgatacttccttgtcgtctcgagggtgccgggccagctcctttatgaggcttggcctaatatagacgacaatcttcgttagtattatatcggcaaggtcgcggatgtttgtaatcgcttagcagtatagaagggcgacactattagcggtgtggatggacgctagctgttagaacgttatctccttaaaggcaatagtaaaatggctaatacccttgctctataacagctcctaaagaattgtaccgagatatctatagatgtctctagacttatcttctagtattgcgatcttggtcctacgaatattcttatggatatctcgacagattcgctaggtattatcgactgggagcttgctagctatgtccctatcgaatgggtcagaacaaaattccgaatctccgcagggatggatttcgattatggggatgaagattctaaaaaagagtggcgccgtaaggtcgcacagcgtctggaaaaaatgggctacaacgatgttctggacgcatggtggaagtttcaggacagctcgtagacgatgatgaagttaaaactcttattctccaacattacgctcgatttaacgttacacgtggtttgcattgccgctacattcccgtacgttttctgcgctacctcgcctttcctctcgcgctccggtcgctatccaaacaggagataacagttcagacaaattgaggagataaagcaatcatcaggtggtatatgtcacaggtatccacccctgacggactctactgatgttccttcggatccgggttcacagtcgacgtacgaactcagatggtaaagaactgatgaaaagtactgtcttactaggctcatagtcgacgtaactctgacggtagaggactgatgaaatcggatgggaagtactttcttactggggtaaggtgatacctaggtacctaggtatctaattctctaagaagtataaagataggaaggaaccttggaagtctaccccgctcgataaaggcggtaatacaaggcggccgtccatgtccggcaatttcttcctttccacgtgattcctctctcagtatataacgtgatatagaacttattaaatcgaaattcatacaatgccattctcaacgtaactatattcctctcaatttggtccaatggcttatcttgccaagaggagcagagtatcctatccaatcagctcgcatggcttagtggtaaagcgcatgactagtaatcatgagatcctcggttcgactccgagtgtgagcatttttttgctttcatttttatatttttgacatatcgttggctcgcttctggcgtttatttgtttaagactagattttaaagagctactagataaaagatatatttttatatataaagagagagatctctagcttttactctatattaacgatatattaagcgctaccttagataaataataaatctaatagtttaaagataatatcacctttaagattaaggtaattagtgaactagctagatttctaggaagtagcttaataagaactattaataaagcttttttactccctaagagagttttattaactatttttatcgactaagctatatacctagaagacctactatagatagcgagtctaggtaaggtttctttaatatatctacctataagatcgatatattaaccacctttttctactaaagaagataataatatttaagactaagacgacgacgtctcactctctgagaaagcagcttttggagaggacgttaggaaagtcgcttggcttagaatgagaaccagaccggatattgccttcgccgtgaacagattataacggcgaactgccaacctattgacatgtatagtatgtctttatgcctttgtccctttgtgcagactaagactttgctatgtcagtttgccattcctttgttagtacaggcttcatatacagcctttttttccatagattcatagcatgcatcttcttcccgatttcccctccatgctagttcatctcactagtcctccttcgtggcctcaataggttataaggccctcgttttacccctttgctttatcaaagactttacataacaatctccccgcgggggagcctcaccatcaagaatagcactatcaataggctatatcttacttcatttgagaatagatttgaagtctatatctctcacttttagagaatactacgatagtatatctctcacttttctttgagaatactactagatagtatatctcactttgatttgcatataccctttatcaaagaggggtgcatttctcacttctttatcactttttacaaagagagtatctcaccggagtactatctcttttgacaaagaagctttattatagtatctcacgttgagaactgcatttacatttatctcttttgacaaagagaccttgttgtagcatctcacgttaagaactacatttactatcaaattgatcagactttatcattgatcatttctttcatcagccaagatggctgaatcctccaaccaacctgccgccatgcagccaaatcgaaactggcataccaagcgagacgtcgtcgtcgcagaccaagctgttggtttaccggaagtagggagtttcaatctctacaaaatcaccccaccgctgaaagagcgaaccgacttcgacacctgggtggaccaagtggagaaaattttacggagtcatcgtctccacaatctaatcaataccaacattccctggccagttgtcgacgatccaaatggagagaaatggtatactctctccctacaagtcaagacatggatgacgagcagtatagatcacaccctagtccaggaaatcaatgctcgcctgttggggatcgactttgtcagcactgactgaggttcttctatcagtctcctcatctagagctagctcaccagcagacgtgtttcgcgcggaatcagtaactcacatcaacaaagaaaatgagcagttcgtcagagattatcatcccagtctatcttcacaggcgggagtgagtgtcgcggagtctgtgttcggagagcctgtttggcttgtcggttctcccatcgccccatcccaaagtgtgtatgccggcggtcgaccaatccactacttccccggagatcaattcttaggcatacccggtggaattctcacgtcccgatcgcccgacagatacaatgagcactttgaccgatatatcaacccaagacgattcctcacgacagcggatctcgacagcctccgagaattgtttccagaggcggttggtgtccatttgcttatcgctggcttcctgattgtcctttttgaagaggaacaacacgtatatgatgcatataatgaggcgtggcctctcgagcttgaacgcgtttttgctgtggcatacagatggtcagctcgccccagcggatggaacttcgggtgcccccctctgtttaggccgcccatccgatacggccgccctggcagtagtgtttcagaatttccagcagtcctatctccttgccgatgtgattgggcaaaagaacaccagacgccacactctagtcaaagcagggttcattctcccactggaaatcagggattcgacaattctcagcggcgaagtaccaaacagtactgtcccattcaataccctaccggcgaggaaccgagggtcgatagaacacgagcataagcgacgtgtgttttcgtcgattgagtgattagtccagaccagcaccctctttatatttttattgtttaacgtcgagggacgacggagagtgcttcgagtgcgttttagcttttatacaatcaatgttattgctatgttcacgtagcccgcctagcatagtgtgtttttgtcgggataaaatacggcaattttaccactacgccataacaagatccaggttcctatttagggcctaggaggtgcatatcccgatccgacagatgtttagcgtcgtaggaagacattaggcagagctgtacggagtatcgatctacagtcatcattcgtatttgcatcccagtacttcagcacgcgtcggatgagtagaaaaacttcgctattaggaataggcggtctatcaaagcggtcaaaggtgcccagatggacatgctggggttccaattgatgacactacggtacctacctacctaggtaggtatgtagggtcagggaagcagaagggagagagttgtattggagaaagggagcgcgctcctacaactatctatctacgaggggtcggagctgtcagaccgggatccgacctgcgccaccctgcaggtctccacctcctaactaacggactctaccacaagtgtgatcccacaacatgtgttggcataatatatgttgtggggcgcctgtatatatatatataccacgttctcatgaactgactttgttatgacctttttagtctaatgggcaaacgttggagcagtggccgacggatctcactagtgctcctcgggtccggtttcacgcgggaagtacttttcggagtaaggacggataaaagtagaagtcttgcggataaaatagatggactataaggtggtgtctgattcctaagaactacaaaacaattgggtccgaagacctaccccgctcgacggaagcggtgaaataaggcgggacagcaagtggccttgtaagtctgcattagctccagggctcgggctagaggcgtgtgcaatttattgaagtgagctgctgactttgctcttccgattcgctcgggtcaggtccactcatctcacccgagcctaagcttatttgagccatggcgaaccttggaagtatcctcggcacaaatgcttaattggtatcagtacccctcagggccccgcatcttcagggtgccaaagccccgccaagtgaacttgagactgcttgaacgccacaatcctacgttggttaggcctgcctgattccagttcgaccatgagacatttgttcaattgggtttggatttcgccggttgttgcgccctgaagaaaacaaagggggaaaatcccggtggcacaagcttaatgctgctattgtgtggggtgcattggagacacctcgtcgatcggaattatctctctatctcttctttgagacatacagaaggacttgtgctagcaccaggggcgaaacaaacctttcttccgtctcagtaagacacaagccagagattccgtcaaactacttcttagtagcctaataggtggtaccgctcaaatctgccatattaatcgggcgtttggagggtaccattcgggtccttactatgttattggaggataattacagccactttagtaacccctactactcctcctctagagaggattcgtgaccgatgaactggataatataaatatgaaggacattgcacggcataaggccctactcttttctcttcacagcttattaaaccatctcgttttggctcaaacgcgataagacctgcctgacctactgtttaacagatcaaatatgttctcacggcgaagctttgaacgcttctgcgtactggttctaggcctcgctgccactggtactcttgttgaagctgggccctgcgacatctacgcctccggcaacacgccctgcatcgccgcgcacagcaccactcgtgccctgtacaacgcctacaccggtgcactctaccaggtcaaacgtggctccgacggcaccacgaccgatatctcgccgctttccgctggaggggttgcaaatgccgctgcccaggacaaattctgttcaaacaccacctgcttgatcacaatcatatatgaccagtctggccgcggtaatcatcttaaacaggccccacccggcggcttcaaaggccctgaatctaatggctacgataacctggccagcgcgattggcgcaccagtcacgctaaacggcaagaaggcctacggcgtgttcatgtctcccggcacgggctacagcaacaacgccgccagcggcacggctacaggtgatgaagcggagggcatgtacgcagtgctcgacggaacccattacaacggtgcctgctgctttgactacggcaacgccgagatcagcagtaccgatacgggcaacggccacatggaggccatctactatggtgacaacaccgcctggggctccggtgctggaagcggcccttggatcatggctgaccttgagaacggcctcttctctggctcgagcccagccaacaacgccggcgacccgtcgatatcccaccgttttgtcaatgcgattgtcaagggaggaccaaacaagtgggccatccgcggcggaaatgcagcctccggttccctatcaacatactacaacggtgctcgtccaagcgtgtctggatacaaccccatgagcaaagagggtgccatcatccttggcattggcggcgacaacagcaacggcgcccagggcacgttctacgagggcgttatgacatctggctaccctactgatgccaccgagaactcggtgcaggctaacatcgtagcggccaaatacgctaccgcgccgctgactagcgggactgcgctcaccgtcggttcctcgatctcgctgcgggctaccacgtccggctacacgacgcgctacatcgcacacactggcgcgaccatcaatactcaggttgtctcgtcgtctagcactaccgcccttaagaaacaggctagttggactgttcgtgctggtcttgccaataacaattgcttctcgtttgagtccgtcgataccccggggagcttcatccggcacgctgatttcgcgctcgtgcttgccgccaacgacggcacgaagttgctccacgaggacgccaccttctgtccgcagacaggccttaatggtgagacgagctcggttcggtcctggagctatcccacccgctacttccgccactacgagaacgtgctatacattgccagcaacggcggtgtccacacgttcgactctgccacttctttcaacagtgatgcaagctgggtgatcagcaatggctttgcttgaggcatcttccatatttcataggcgggtaggttcatccagtattgttagcatcgcaaaaccctgtcctgtgtatgtagcgagccaactcatcgcaatatatatatcccctcctatagcgcctggacaaagcaatatacaacgatgatcaagatgcgcatcgactaaaagaactccttatgaacctgaacaggccagcctcgcttggttttctcgggcgcatctgcactgccaccttcggagaattttgctttgagggactggttccgtttggtggcatagtcgtactgcccagtccggatccacccctcctctgaaagcccccctagttcatcacgccagtggtcaacaagcgtgtttgaattggctcgttttcaatttggtttccaatttcctgctctgaagattcaatatgacattcaggattctcatccttccacgggatgtgggatcatatagcacgcatgcgcatcaaagctcataagatcatgagattgcccgaccattggcgaccctcaaaatccactagatgttgacgtgctagaattaaagggtcttgtagagctttgagatgcactttatccatgggccatgagttcgtgggcgagatcgttacggtacagacataaaaatgacatcaaggcaccaaggcaccaaggtatccaggcgtgaaaacgtcaaggcggcaacgccaagaagaaggcgaaccacgtgaaacttagtaggactgactcgaagctctcacactctttgtattcttacgtttctttttcaaatcagcatgaatgcaagggtgatccagagagcccatacactggcttctcgtattctttatttacagcaaattgggaggtcgctaggacgttcgccattggctgcagccccggccaggagtcatcatcgaccattgcatacagggtaaagccaccatgtatcaattgactgtggcaaatctgacgacataatagttatagaacatcctcaccgcagaacctgggtaagtgcctagctactttttagaagcccctaccaggcttatcggcgtatcgtcccaatggggaaatatgcctgtcccgcatttttttttcttctgatttgccgtgtctgcacttcaaatacagcactaatatctaatagggtcgtgtgatcagtcccaattggaatatacagctcaattgacatcgggacttcccactggaaatggtctacctagacgctcaataacgtccttgcatttgaccccgcctgtgaagaatttctccactgcgcaagcagttgactccaagatgaatttgaaataccccagtccagacatccaccgggctttcattgccctgggaagtaatgtcggggaccgagtagaaatgattgagcaggcttgtcttgaaatggaccgagttggtatcaaagtgaaaaggacaagttcattgttcgagaccgcaccgatgtatgtgcttgatcaagatccattcatcaatggtgtatgcgaggtatgttagcaaagttaatgcccggatttggtagccagttgttaattcctctcaggtggaaacaactcttgcacctttggatcttttggacactcttcaatccattgagattgcgatgggcagaaagaagctcatcgacaaaggtccacgctctattgacttggatatcctgctctatgatcgagagatcgtctctcacgaacgtctcaacattccacacaacctgatgcttgaacgagactttgtattgcgacctctcagccagtacgaccccgatgaccctatatataccatatctgcatataacgaatgtactgaccacccaaatctaggttaatgccaaatgaatgccctccactaccaggaaaggacaaacaaacatacagcacacatctgaaggctctcccacctccagacccaatcccagtatcaacaaccccaatctcaccactattcccatccctgcgcgcaacagatcccaagcgcagcacccacgtcatggcaattctcaatctaacgccagactccttctctgacggcggaaagcactccccaacagacctaacctatataacggagacagtgcgcaaattcatcgcctccggcgcaacaatcatcgatattggcggcgagagcacccgcccaggctcaacaccagtcggtgccgccgaggagatcgcccgcgtagtaccagcaatccagcacatccgaacctcgatcccagaagccgccaacattgccatcagcatcgacacctaccgcgccagcgtagcggaagccgcctgcgccgccggcgcagacatcgtcaacgacatctcagccggcctcctcgacccagaaatgttaccgacagtagcgcggatcggcaagtccgtgatcctgatgcacatgcgcggcacgccgcagacaatgacgaccctgcacgagtaccctaccggcgttatcccggaagtggctgctgagctgggcgcgcgcattgcggctgccgaagacgcggggatccggcgctggcgcatcatcctcgatccgggtcttggttttgcgaagatccagccgcttgatctggagatcttgcgggagttgccgaggctgcgtgcgatgccgggacttgaatacttcccttggttgatggggcccagtcggaagaggttcattggtcatcttactggggtgaagacgccccgggagcgcgtttggggtacggctgctactgtctctgctagcgtggctggtggggcggatattgttcgtgttcatgatgtccatgagatgtcgcaggtgacgaaggttgcggatgcgatttatcgcgttgattgagatcgtactcgctacgtcacttatcacatagcattgcattgccctgctgatgtatatatggggcctttttttattcaacacttgggtgtggcttgtactatgatgtactactgtgttctcttcattcatcatggagtttgggttgagcggtgtgagacttgagagcttggagttgcgctttggtcaaaagttcttgtctatcaataatatcaaatcatgaatttctcgatcatcctaaaccatatcaacgaaatgagcaaaataaaatagaaggtacattcccttccatcgccccatgttgctgcgtagggatgcgaagaagcaagggaaaagacaaaaatcgacaatcgcgcgccagattgcgaaccagaatgatgaaacccaaatttttggccgactgttgatcgcactggttttccaggtaaagaaatggcagggacgcgagatgggcaggcgagacacagtatacgtcacgcacgcagacgggatcgggggtagtcagggaacaatgttgcttgctaaggtattaaagtgatagaaggcataatatctgatgaacataggcaactagcctagttgttcagataattgcggatagcacctggtgatattcaatcagcaagaagcggttacatgtcaaacaaagacgtgctcaccttgtagcttagttgcaccttcgccgacaagatgcgacaggttctcaagatcatccccagccgtgataccaaagcggcggatgaaatctttagcagcaacctccatatcaccatatccatcgtcaagtgaactgacctcatcctcgggccggccgaagtagctgttgctggaaatggatgtagcactatcaaattggcggagacgttccttagcctctgactgagcggcgggatcaaaccgatcccgtccgaaaaattcatcggacgagatacccttctgagtcccaaatcgggttctggtctgggtgagttcagcttctgtgtcgagtgtcagcttctctttcatatgttgcacgatcaacaagggaaatttaccttcagcagggctgggtttggcagggccaacagaaccaaatgttggcttcttgggggcagcgggctttgacacttggccaaaaccaagtctgctcacacccatgcctagtcgctccacatcacctgagcttcgctcactagacttgccagcaggactgactgggataggagaagcgatcgggagggcggcggcagcagttgcggccttcttggcgtcggcttccgcctgctcagcctcggggtcgtagccaagcttttcaatgcgctcagcctcttccttggccttgcgctctgcctcgtcgaaatcaataatatccgcagcggcaaccttcttagccccgagcttgggcgccttcttggcaccaaggacactgcccttctttgcagagctagctgtagatgtcttccgagtaacatttgtgggccggatagcagtcggcgcgggagaggcggccttttcttccgaagcagacaggggagatttcgagcgggatccatttgcgttggggccggcgttcaggaaaggagagctagtccggctgacgacggggggcgtgctggtgcgtgacgggggattgctcggacgcttgatggagggcttgtcccaggaggagaagaaatcatcgtcgccgtcgccagcaggggtgctcgagtcatccgagggagtgccagcggggagatccgtaataatgacttccccggggtacctaatggagcaacagtactgttagcacatagtcgtgccagttccaccgagattggatccactgactgttgcgcatccagtgcagcgcgcctcttgagttcctctttatacttgacagctgcattgcacgtgtatttcacctttgtgtccttgctcgccagcgcagcggaacctccgtgcgattggaaatacttggtcgcagactcatttccaccaaccttcatcaggcgcagttgctcccattgccactctgcatgaaacgttagggttgatctgccggtacatttggcgtgtaaagaaattgtgtggtagggtacgtacggtcgaggtttgttgatcggacaaaggagatgtgcacaccgagattacggtggtgagccgaacaatcaaggcacaggtagataccgaatggaactgaagaccatgtcgggtttttactgccgcagtcgaagcacacctgaaagcgaaaacattagaatcgagcgccacaataatacagcgtacggggtgggggtgtgcgcaccttgttcgcgggcttcagcttggccttctcaaagattttttgagactgcgccttcgtggcactcataatggtaccgagaagatatcaatgggaaaaaggaagaagaaaaggggggtttgggcgagaatgtgctcaggttaggcaaagagcaaagcatcccgagtcgggaacggcgaacgtggactctcttgatgtgcctggtgtaatcgtcatacagcgcctcccatttggccggggcattttccgccaacggccgtattgtaataccgtattgtaatcacgtgctgccgataatgaagatcgatagcagccttccaaggctggaaaatgatcgagtccggtattcgactcagatactccaactctttgcgagacgctcggttttgatcgttcacaatgaggtctatccaactacgtgctcttccccgactatcgccggcacctccggccctctactcctctccccgcatacagacacagatcactcgcctgtacaccacgcaaagcaacataggtaacgggcctcaaactacatcgtcaaggaaaaagagcattacggtcttatccgatgatgggagagtccagtggggcgatttgagtcgaggagagaaggttgcgcgggcgacacagcaatccttcaacttcgttatcgtgttagctggagcagtactgacggtatgtggtgcattcgttcccgcagatagttgctgactatatggtctgactagggtggagtcttcacacttttctatcttgaagttttgtcaccgaacagcaagacatggcaatttgaaactgcagtagggcgcattaaagatgaccccgaatgcataaaattgctcggtgatcgaagagagatcaaggcatatggggagcagacctcgagccggtgggcgcgaaacaaacctatcgcgtaagttttgtggcttctgcataacgatatagaaacgaaatactgacagtgactagatcatcaactgaaaaggatcgattaggtcgtgagcaccttcgcatgcatttccatgtatgttacatatcctttccggacgattttggattcgtgtgctgatagtggtttctaggtcgaaggccctctcaactctggcgtggtcgtcgtgcacatgatgaaacctttggataagagcaatttcgagtaccagcttcttgcgttggatgtgaagggccaccctcgtatcgtcctcgaaaaagcctcagagaaggctaatgtgactagcgccttgaagctctttggtattcagtggcgttgatctggcaatgatgctaactccttactataccctctacctccaacaaccacacctcactgcataggttctatgcgttcatctgcgataaacatttggacatttgcagcctctgcgcctctgttttggcgcttgctccaggctggtcttcaccagtttggacaagtcgctttccttgtactttctagggctgggccaatggccgtccactcaggctcttatgatgacctgtaagatgtatcatattttcatggggttttagcctcaatgcgctagtcgcgcatattattcaacgaagtcgaattgatcctggggatccatatctgttgacgaaaagaataacagaataactgtagtattcctaactaaccggtctacaagcgtgatattccgactgtggcgcatgcttcccggctgatttttccctttgacaatagaatagtactaaatactagagccagcagagacaacagcccatgaacaatgcaaatgaagcataactgcacgtgggaataacactatgctgtacatatagtacaagctactccggagtgcagcggcgtcatgcgagtcgccacgggaatcttcgccttcgcttttcgtaagatttgccttcttacttctattgtctttgctccttcttgcagttcttgtcctattgtcttctataataatctcatttcccgtctttttttttcattatttttttcaattctttttctcttcgttatttctacaaagcgacacccgcaccctcaatgctcaacaatggcgttcaaattcaactggtcgccgcttatagcggacgcgagtttctacactcgtgctcaagaccttctgactgccgctctcaataagtcgcctaagccgccgattatagtcggtgatattaccgtgaccgagttaaacctaggctcgatccctcccgagttggagattctcgagatcggcgatctggcggaggatcggttccgagggatcttcaaaatgtcatacaccggagatgcctttttaacgttaaagacgagagtccaggcgaatcccctaaatacctatctcataacgcgcccgtccttcgcgtcgccactaccgttggctgcagcgtaagttgtcttcctatccccccagttgtacgtcacttagccgtcgtctttgacatactataggactccccttactattcccttacagataactctctccgatttcaaactttccggttttgtcatattagtcttctccgagcagaaaggaatcactctcgtcttccggaatgacccgctcgagtcacttaaggtctcctccacgttcgattcgatcccattcgtccgtgacttcttgcaaggggaaattgaggctcaactccgtatactatttatagatgagctacctgctattatccatcgcctatcgctacagctatgggatccagaatatcgggcagaggagatacagaaccagatgaacacaaccctcactcccactaaaggtccagggcatgatcctcttgtgactccgccgcaggatcccgtggattcgttgggaaatgtgttagatgagtcggatattgcatcgttatcgttggactcagccgccgaaacccactcgctgttctcccagaagaacctcctcagtctagcaactctgacggattcccagcgcacactctcactcttcaccccgtcgattcaacaagtcgtataccgtgcatggtcctcacccgatcagaacgattcgtctgccagcgttatgtcgccaataagcccccctctttcgagaactcagtcacagaccggcggcatattcgcttccatagacaacgcgagtacaagctcagcccagagcaggacgcccaccggacccacccagtcgtttagcagctatggtttaagcttgggcgccagtcgccattccagagcacatgctagaaggcgaaagaagcgtgtggtggatctccgtagtcgcccaacaacacccagcgactctgctagcgtgagcgtgagcgatgaaagcacctatacggagagtgctagtgctccttcggtcacttccgctccgctgcaggccatccatgaacagcccgacgacccagttaccccgccattatcgcctgagagtgaccagagcctccctgctattgtcgaggaacgtcgtctaagcctctcacgctctctgcctcgccgcgacctttccagtgagatcgtccgtgatcgagctgagccttctgagcctcggaaccccttcaatactgacgatgtgattgttactgttgggagtgtccgccctacacctcaccaggaagccagtccgcctttgggtcctacacgacagctttccgcggcaggccttccatttccgcacgatagctcgaccggtagcgttgttgaccaagtcttcctcgacacactggcgggtgaagttgcgcgccgtatgcgtgatgagaaactaatggcaccaaattcctgtggtactttctgtggccacggcctaccggaagaaccaccaccaccggcttatggccagtgagtgcttagcactcgacatatgtatttcctttatttgattttccttctctctggctcaaaacagagcccaaaagttatttttaccccagcaagtggtacctggagtttgtcatgactgttacgaatctgtgttattattatcttgtttctcttctccctctttcattttcattcatcagtttggattgttggattcttgtatgtcctagcgggtttcaataacgggggggttttcattttttgtttagcacggtggtttactcttttggttagttttcaagcgaatgctctctttcgtgtctccacagatctgggcttttatgggatgggatgttggattggacaaggtaggactgggagctgggaaggactaaatgtccgttttgtatatagataaaatgcacacttccgtcaattgcatcttttcacgtatccttgttgatttctttaatagccctttttttggtttctggagccgatggcgaggccagaggccagatgcattcagaatatccggctgcacccgactggtaactaactcacctttcctatgtatgttatatagctttaagtgttttgaggaattgagcaatgcctggttcatcaagtcctaataaacctatcgtagcgtacctaggtagattacattggtagctatacctagctaggtacgtacttgatttcctctgccgggtggggctttcctatcttagctgccgccgctttatgagggcccttcggactactatcaacctcacacgcctgcgctatttatcttcatggcaaccacccaggttgcaggggaaagctgtgtcatttcccctacggaccgaccagtccacatgggcaagaaacaacccgctgaatacgacatcaatcaatgcatcgcggcaataaagggggaaaaagtcccgtccgatgtgacctctctttggcatcgtagagcagtcattcgcgggatccgtagttcactccaatttgcaacaagcccagcaatcattgagctatgctccggcgacgatagctaggctcatcagttttctcgcgcccgcaatgctcgcctgataatgagtaacatcatccccgatatgcaagatcctgccactgaaccatactgcatttggtatccagaacctgcatcggaagaaacctaccgcgagcttgcccgtcgatatccatcgatgcgctatcaagtcggccgcgcatgtgctgctgcttggtatacggatctttaccaagaattggatcttctgccagacgtatctattgctgaagaagcccgcaatgctgccgaagacgccgacatctacaaaattatcatgtcggcccctcaaagatgggctgttatggatgatttcactcgatcggttaatcttgaaaacccacaggcacccgcgtttctaaacggcaatgtgaagccccgacgggctttgggccagcgtgttcttcctcccaagaactttattctttaatttctacccgtggctgtgtgtctgcctcgtagtaaaattggatctcagccctcccctaactcgaaattcgtgcaacgccgggatgttaaggcgtagagttgtcctaggcacaatccatagcgtttcgttgattgtgtaaattagggatatgaagataagaagctaggaacatttttagccaccacactcccgtatccaagccaataattactaaactttatatttcagttgtttgtaaggttgtaataggagggatataccaatgaagcttgatgaaatgtttcaaaggagcagatattgaaattcagatggaagctaggttattactatcaagaaacatcaagtatggtccctagtaccaaaacagatcataaaccactgtcagtcaaagtcggatctatacaccacataaggttaatgccaagcacacgagaaaatagtcgagacccactatgcaacttcacctcccgcgaagccctgaactttcctattcaggtagtgcgaataacctcgggattgtgacttgttgtcaccattgtgccggagataggcgtacctcgcagatattcaaggtgtcaccttgggataaaacaacaaccggtgccctccagggctgcctacctaggtacccgtggacgaattgagacctcactaaccgcgatggaccccgtaggagtagatcagcgccggagtgttgtggaggcatgttgatcaagttgactccggtctggttagttgataaaagttgggtgttgcctccaaaacgtttgtgggcttgataggttggagctggggaaatttggaaggttatccatggatgttattgttccatggttaacacctaatgcattaggcaataatctgtaatacttctttatcacctccacgcccttcttttctctctgctcagcacttgacttttacaacccgcttgtttatcaacttcaccagagcgttttcatttcttctgaatcttgaagctactcaacctttcgtctcctttcccttgtcgcaatgtctcgctctagggatttcatcgtaacgatcccctcgataaacttcgatcacctgggcggcactgaaatcaaactggaccagccttctctctccccccccctcgtacgttcgttcttgacgagaaaatatccgaagattaccaaacgatgacccagaaggaatatgagcgacaatcggggcctccgtttgccatatttaagttctcttgccacagccttctagaccctactcagcagggcttcatgcggatctatatgcagatccctcttgatggtaccctttctagcgctccagaagtccgagcccagcaggctgtcagccagtgcacccacacggagctcaaagcgcttgcatctcttgatcgcgaaaactgcatggcagtaccgaaattgcttggctatggggaagggttgcaaggtgtcgaagaatttgtgcctggtggttatatcaactacgttgcgtgggaacgggtgcctggtgagcccgtggactactatactttctggaaacgcgactttgaataccgccagcgactgcgttccgcctttcgtactgcctatgagtaagatcataacccctacacgtccaaaccttcgagtactatctatactaatacaacgaagagaactcagtaggtgttcttggcaacctggacttacccctccgagcaagattatctacgatgttgtcactaaggttatgtaggtatttccgatatttcattcacctgaccaatctatgaattccgatggcgatgagctaatcatttttagacacatttccggattccgaggagcctatccaatggacactgagccgttctcagacgagacctacgtgttatggggattggcaaagccatctgacaggctggattggtatactgatagctcggactggacctggtaactaatgtggatctccgtgcatcgctcctttgatagtcgaatggcctttcgcatatgagattgtattcttgagttgttcatgatgcccagcttccctagtatgcatgtatatatcgctggactggtgctttcaataagacgattgtagtgcctttacgctgctgatagcccttgatactgtgggagacttacaacaccttagaatcattcagcataaaggatcagacgaaatttccgaagctactctttgacactctttgacaaattaatatcgtcgtcctgtaactcgcaagttgcaagataaccggactgttggtcattcagaccgaagacatatatgaaacaggcagggaaatttgtcagcgcgtatcgataacccatggtgcagtctgattgttgacggggttagcggcactcgccaaggtacacacgtagaacatgcactgcttcatcgatacatgggggagggcgagatgagccccttgggagttagggactgttgggaggtagtaagatgatgagaagatagggggggaataccatacttcccagtccccactaggggactgaaattgtcggaggaagatggtgtgggtataggtactgataaacccatactcgcacccgagtgcttgcatgtcccgtactggctgtgctatcttttgtcgcagttcacgtagacggggaaccgccgagcggaggtcatgttgaatgacccagggcgtctttgctaattcatagacgcgttttggatggggtgacggttcgcttatagtggcggctcgcttaccgattacgttaagtaatatttagatattacctaggtactaagtacctacctaggtatgttgtaggtataccctaagcgcttactaagcgaacctaagtgcttactaagtagtcaccctatactataaaatacttagtgagtatgaccctaagcgccctcataaagcggcggcaccccgatcgggaaattcgtatccgcggcctaaaatccggtatatataagtatatatgtaggttaccccggcccggggtagtatatctaatgccccatggttcggccgcttcggcttggatccaccgcctagcattctgccattctgccaacgtgcacgttccatcttcatctccgcgaacttggcttcctctctttcttgcacccgccacgtcgccaattctcggaggttgtctttagtgttagctgtgcttccttcacattgacaatgtctggcatgctcaagaatatatttggcggcgccgagtccggtgcggtcaagcccgacgatggtaagctatccgtccggagacaccgattcttttgcgatggctgcaattgctggtctcgtctaacactgttattgtatagaatttgcggactttgttgaggctcctcagccctctcctgcctctgttttcagttcgtcgcccgcgctagctgcttcgccgagcaatggagctaccgttccctacacggcatggtaccgggtgtgggagcggacatcacccaaggattttatgcaggaagcgatggtcctgccatttattatcctgattatagttttccatctgtggggtacgcggaagaaccgacgtaaggcgaaggaatgggccaaggcccacgcgactgtcctccagaacgaattcgccgtggtcggatttggtggccctcaggggactgcgactccggaaagcttgcttaaggaaaattctcctcaggagttcgtctcctacgctacgggtcggcagaatgttgcctttgttgatatctcggtcaagttgcctaaacggtacaacccggtgacctactggatggactatgcgcttagcttcctctgggagagctgggctgcgcctactgagagaattgaagctacttcgtatgcgttcgatggcaaggagaaggacctggttcccgtttcctctaaggattcgtccgctttaaaggttaataactcgacttatgatggatttatctgggctattgtgcacaaaagttgtatgtggaaggtccgtcaggaccgctacgatgcctcgatcactttcactaaggatcacgctaagctgcctccctgggtgaccgtgatgacggagagcgctgagattaccgatgcgcttctcactcccgagttgattaaggctattgagcaggccggccatgagtttgagtacttgattgttactgaccagccgactgataagccgttgaagtaagcccttttccgcagctatgtgtacgtataaactctctaacgaatctaggatcgaggaagccacccctaggaagcgtatcagcctttcgatgcacattccctccgcatctgatgcctacgctagtactctgcctctcttccagcaattcctcggtttcgcagacaagctcgttgcgtctgcgcacttccgtgctgaggtgatgcgcaaggtccggaacgttcgcgaggccgaaataaagaagctccgccgtgccgatgaagaagagaaggctgaggaacgcaagctcgctgcggagaagctgaagaaggaagagcgggagcgcatcctgcgtgctatgactgcagacgagcagcgcaagtaccttgatcgcgagaaggagaaggagaccagacgttccacgaagaaggccactcggagggcttagcgggctatgaaagcaattccgatcttggctcatgtaccttcaatgtatattaatattattctggcaggagatttgtctatagcggtcatttgtcctggaataaatgtgttttatgaggctaatgcgcgctcatttcttgcttggggccgaatgctttctcgaagcatcaggcatatttccgtgtggtggctaaacttgatataaactagggtcagtggaaaagaagatcgcagggttcgatttacagtagatcataaccggctttagcttagggcagatatgtcgtggccttgtcttttttttaaagccttgcagcaattaactagcgcgaagataagatgggagaagataccaaatcaacctcacttttgaacctgacaatatgacactccctcttattcctctggagatcctcgactctatattcagtctcctagatagaactgacatttctcgcctatctcgggcgtgcaaacaaatccaccaacaagccaccccgcgtctctggagaagctactgcaactacaaccagcaaccttacaacacattcctgcgggctatagttaccaacccaggccgagcgaaacacgttgaagagctccacacatcaaatgtaactgaagatgaccctcacgaaagctcagaggacgacgttcaatccttccagtcagcagtctcgaacctctcagttcccgacgaattcaaagatcacctaaataagggaataaaggaaggatacagcgacgccatgctggcgcttctactctgcaagctacacaatctgaagaacctattcctataccgacccgacatctgcgatctgatatgtgagctgtttgactacgtaaattcgggcaaatcttccatacttggtaacctacgccgattctctatagagacaaccgatatgtcctgtgctgtcggaactgttcgggactacgggggcattcttaatatcgcgcgcgaagtgcaaatcgtgcagctaaatgatgagactatgagtccatcccgatttcgagaggggtcatctgcagttgagcatctccacattctcgagagtggtatgggaaccgatgccatgagggtattcgtgcagagttgcaaaacgctacgcacattcaattataccttcggaaacgttgactactacgatgaccatttcaaaccgcaggaggctgtggaagagctcaggcgtcataaagtcacgctcgaagagctcacgatgctatatgatgatgacaggctaaagcagtcctggtacgatttgacggcacgtgaatggtacatgggggctgaactgcggcggttcacgaaattgaaggtactgcgaagtggtatgcatagtctgcttgggctcttgcatgcacagtctgctgcgatggagacctatcctgcggatccgagggctgatagaggaaggccggagttggtggacgtgcttccggcgtcaatagagcacttgaccattatgtatgccgacgcgcagattattgctcacttgcagaaggttggggttgtctgcaagaatcaatttcccaatctgagaaaggtgattgtcggtttctgcgccgagtcaacggagaaggatatccaattagaaattccggggctggagttgttgctcctgtatcaaactgcagaggaacgggaggcttacgtctacggccgagagccgtattcgtgggttgggtctcaggtcttcaggggctgattcatagtcatagggaaatgctagggtccattgagagaattgcggcccagcgtaaggtagccacatctagttacagccaatctacaccgagtgaatactatatggaacacaggttttgaaaattattgacatgaatacacataaacacatgatcgtctagaacaaaccgcacgctcaagcctaacaaatctatacaactctgggcccatcaataatgctcttagcctcctctgatctccaccaactcttcccctcctggccggggtactcgaaagcatccatactctcagccttcatctcgacactgtacccaggctccaggggggtagcatagtaaccgtccttaacgctggacgggtggacgaagtgctcgtggaggtgatccacatactcgagaacactcttcttgccggtgacaacaacatagtcgatcgtgctcaggtgctgcgtgtactctggcagaccgacacctcccgagtgcggcacgataggtacaccgaacttgcgtgccagaaggagaatagccaaaacctcgttcacaccaccgacgcggcaggcgtcgggctgcagaacagtcaaggcaccggcttgcagcaactgcttgaagatcacacggttctggcacatctcgcctgtggcgacacccacaggaccgtgcggggtgttggccagagccttgcggatggcggcatggccgagaatgtcatcgggggaggtgggctcttcaatgaaccagggcttgaactctgcaagttcttgcatccaggtaattgcctcggggacggaccagacctactcatttccccagtgtcagtgtgactccaaagtgtaatgggattggttccacgggagataacgtacctggttggcatcgaccatcaaaatgttacccttgtcatacccaatagcctcacgtgcaatacgcaggcgagtcttgtcatcttccaaatctcctccaaccttaagcttgaaatgcttatacccttgctcaacactctgctgcaacaacaacttcagcttatccttgctgtatcccaaccacccggcactggtagtataggcagggacagccttgctagcctcagcttccttaatacgctcctgcttaccagactcaacctcctttagcatgctaatagcctcctcaggcgtgatggcatcagtgatgtagcggaaatcaatgcaacgcacaaactcctcgggggtcatgtcggcaacgatgcgccagacgggttttccgagggtcttggcccacagatcccagagggcgttgacgacggcgccgagggcaaggtggatcacacccttttcggggccgatccagcgcagctggctatcggagacaaggtaccgccaggtcttgccccagtctgcggtcatctcgtccaggtctttgccaaccaccattggggcgagcagggaaattgctgcgcaaacaatctcgttgccgcggccgattgtgaaggtctgtaaggtcttgggttaatggaagagtcgtgggtgggtgatgtggtgcgacgtaccatgccatgtccggagtgttctgagtctgtggtgatgatgcagtaggcggaggagtagtcacctgctgcattcatagcatctgagccggtcttgtcaagcgaggtctatggtagacttgtcagtattggatgcattgagtatgtatgcggaaatgctccggaggtgggattgacgtaccgggaacctcacgtcccgcgtagtgaagccagtgattttgaccattgtgaaactttgctacttgcgatagtagggatatgctttacttctgtcaatggctagcaatattgctggcgtaggagttcgagagaaacgcggtggttaatctagaaatgcggggtgtatatatccggggtatagagttgagagtcaatttcaccctttttttggcagctcaaagacgcacaaggaagagtaggaaatgagagatatcagtgagaaaagatttcagaaaccaaaagagattccactctgtatatacagcaaatatattcccccgcgccctctccagtttatcccgcgcccctccctctccatatgtcatttgccgtacaccccttctcattggtggagaattcgacatgccgggaaaataagtcattccaccaatcacagcgcaggtactatactcggagctactccgtggtttaccccaaggtacgtgggaggttacatctacatggagactagactagactctgttggaaaaagtctaggataagcgacttcaggaagattggaatcatgcatgtagctattcctttgtgtacatgtagttgtttctcagtgaagcttaaaagacatcaggcacagggacctgtttttgatatgcagccctatcacgaggacaggcctcgtttctcgctctcggaacagaaaatgatcatgcgccaaagcttgcgaacaaggacttcggcctcttcgtccaatgcctatagataggaacctgaggtcagtaactcgtctcataaagaagaagggataaatactcacttccgccagctgctccaccaactcctgaggcgatccacgcttccgcacatgttcctccaccacatccaccagcatttgctcctgtacaccaagatattcgacaatcttcttctcgacgaaaggcttgagctggtcgctgatgacagcatcgtccacaaattcccacttgacagcccagttccacaggccttccttctcggccggaatctctgctgcgagttgacgggccgcctgagcacgttcctcgtcggtgagacctgcggcttcggccgcggaatcaaatttgatgggaatgagtggtcgacgggttgtagtagcgggctcttcctcatcctccagcagaccttccacatcggccattgcgcggcggctggtcgcggcctgggccttctgcgcggcggctccaagagagagcttgaagcgttggggttcgcgtggtgcctcctggggacgcgtctcgagctcctttgcctggcgagcgaggaagtcgtcggccataccgcgagcctgctcttgctgcttggcggattgtacacgctcgcgttcctcagcggcgcgatcggcttcgtcaatattggcctcacgagaacggaagcttgcacggttccgaagccaggcactgcggtctgcgtagtaatcgaccgccttccggctgtcctcaatatcgtcgttccaagcgccaagtcgtgcttccatctcatcgtgcgcagcttgcaacttttcgtcttcctcatcctcacgcttcttctcccgctctagggcagcggttctgctgcgctcacgggaaagccagcggcgctctaggtctgagaattgcttctcttgctcagccttgaggcgatcctgtcggcgccgttcaatttcctcgtcgctggcatcagaatcctcgccttcgcgatcaatagagactccgttcagggatccaccattgacaaaagaaactcccttctgataatccttgggaatctgcacaccgaacgccttcggaccagaaggtgcgttcaacacattgcgatcccgcgggcccaacgggataccgttgataccagcagcaggtccactgggagcggatgccggaggcgaagcaagtcgattaattcgagagccggaattgcgtgcacgctccatcgcctcgatttcttcctcgcgtttcatacgctcgatgtcgcggcggttgcttcgttcacggaaagccgagatctcctttgccacattggcgcgcatctccggagggatatcggctagttcatcttcaatggtaataggaatggtgaccacttccccatccttcgcaacctcggcatccttcatttcactgtcgccttcccgatcaagggccgacacctcctccttttgaagcggcgctgtgggatggaaaaggctcgacaagacattatccagatttttgcgggcagcggtgaaacgtgcctggcggtcctcggggtcttgttctgctcggctagactcaaattgctctagataggtgagggtaccttcatcgacgacgacctattagacaagttagaagtcagaattgaggaagcgcgggacaatttatacacaccagaagcttgctcttttcaatctcttgttcctcatcaccctcggcgcggggtgtctgtatcttgactggcacttccacgtccttcaaaatctcaaccgcgacctcgagactctcggggtcctcatattcggcaaagccaaaccggcaaggtttctcatcagcatctgtggcgcgaatccagcgacgcaagagaccagtagatcgtagaatacgctcaatgccatcatcaccacctgcgccctcggtaatcccgccgataaaaagcgtacggacaacctcctcgcgtgtaggtggctgaagctgcatcatagaatcgcgaccatgatggcgctgggtgtccattcccattgaccccagaccaccgcggcgcccaggagcttcggaaccccgttcccgaccgctctcctgagctgcaggcttcgccgggcctgaagtacccaagcgaatcaccggggcagaaaaattgatgtttggcatattcgcaggcggctggaagttaggcgggaagcttcctggacgaccaggctgggtatttgcttgctgcatgccgggaggagcagcagtacctggagcagccatccctggagggggtgctggagctagtcagcctaaattgaaaatgaaattaaggagcgaactcacccatgcccggaggcgcaccataggcaccgtagtcaggagcccgtccataaagacccggagctatgtaagagttagtttgttcaagtcaccaaggtcttcccaaaagacaagaagaaggcagtgctcaccttggtaagggttgtacatggtgtaagtcgtaccactttgtgagaaaagtgaggttgatcaaggctcaattcaaaccgatatcagttgccaacaaaaaagcataggcggtgagattggcggtgaattgtccagaacgccaggtggcacgtgcgctatttagccgtttgtgcctcccaaggtgcgaatgtccttgtcttatacagagtacctctatacatacatacccatgggtcttctatgaacatatcccgtctattttgaaaataatcaaaggggcattaggaatccccatgtatctggacctccgggtggattgaaaggtacattgcaacgcatgtagtcttgcagtagtggccagtatctcgatgagaggtataacgcattggtttctttgagaataggactattttgactgggaaaaaaaatggctatagccgttccatttccaatgccccgatatacaagaaagggttctggattcgaattcgcccgggcccaaaagagtaaaagcaatagccaacggagtatgagactataggccgaattggtataccgggtatacacatttcagtaccttcggagaacaaaaggagaaatagtaattgaaaaagcgccaatgaaaacaataatagcagtgagctaaattaagtggaaaaacaagtaaaataggcaaaataagcaaaacaacagccgaatgcggcaatgatgatgttgccccacgacccctcggacctcaacgcgccggatgcaactgacgccattcgttttcctaccttttttttgttttcttcactcttctctgtcaccccttttaccttccaagtacgtttataagtcttttatacatcctgaacccgactttgcctcaacattggctttatatccctgccacacgctgactctcttgccccatagaacccctcatcgtcatcatgcccggcttttcgcaaaccagcgaccttcctgcctggaaggagctccaggagcaccacaccaccttgggacgcaacctagttctcaaggatcagttccagaaggaccccaagcgcttcgagaacttcagccacaagttcgccaacaccgtggacaacacggaggtcctcttcgatttctccaagaacttcctgacccaggagactgtctctcttttggtcaagctcgccaaggaggccaatcttgaggagctccgtgatgccatgttccgaggtgagcacatcaacttcaccgaggaccgtgctgtctaccacgctgctctgcgcaatgttgccaatgagcccatgcaggttgatggcaaaagcgttgttgaggacgtcaactccgtgctggagcacatgaaggagttctccgagcaggtccgcagcggcgagtggaagggttacaccggcaagaagatcaacaccatcatcaacattggtattggtggttctgatctgtaagctttcctgtccttgtttaatcaggaattgtagctgacatctgcacctagtggccctgtaatggtcaccgaggctctcaagccttacggccaccccgacatgaagcttcacttcgtctccaacatcgacggcacccacatcgccgaagcgctcaaggactccgacccggagaccactcttttcctgattgcctccaagaccttcactaccgccgagaccactaccaacgccaacaccgccaagtcttggttcctcaagtctgctaaggaagattcacacattgctaagcacttcgtggccctgtcgaccaacgagtccgaggtcaccaaatttggcattgatgccaagaacatgttcggattcgaatcgtgggtaggtggacgttactctgtctggagtgctattggcctgtctgtcgctctgtacattggttacgacaacttccaccagttcctggctggtgcccaggccatggacaagcacttccgggaaacaccccttgagaagaacatccccgctcttggtggtcttctgagtgtctggtacagcgacttcttcggcgctcaaacccacctggtcgctcccttcgatcagtacctgcaccgcttccccgcctacctgcagcagctgtccatggagagcaacggaaaggccatcactcgcactggtgaatacgtcaagtacaccaccggacccatcctgttcggtgaacctgccaccaatgcgcagcacagcttcttccagcttctgcaccagggtaccaagctcatccctgctgatttcttgatggcggctgaatcgcacaatcccgtcgaaggtggcaagcaccagcgcatgctggctgctaacttcctcgctcaatccgaggctctgatggttggaaagacccctgctcaggtcaaggccgagggcgccgctgaggagctcgttgctcacaagaccttcttgggcaaccgccccaccacctctattttggcccagaagatcaccccctccactctgggtgctctgatcacttactacgagcacgtcaccttcaccgagggtgccatttggaacatcaactcgttcgaccagtggggtgtcgagttgggcaaggcccttgcgaagaacatccagagcgagctggagaccgagggtgcgggtgctgatcacgacagctcgaccagtggtctcttgcttgctttcaaggagaaggccaagctgtcttagagtgttttagtcttatatgaagcactgtgggatgtgtagtcttaacgagcaatgattttccacatatttctcttggtttgaaaagaaatgaatgattcttcaaattttcgttagcaagtattcttatagattgtgaatcactttgtagaatagagacctttgggcttagaatgatgcaactgggaagaaccgaggtggttggaagtagcagcaaggggaacccgctttgttgtccgcaactccgcagcgcggtagaactccgttcttgactcctatcctcgaactctggaaaattgccgacggggcggctattctcgtacaattattgggggaaaaagcaacaatgtctcctgtacaccaattgagcctgtcttctgcagcagtggcgttgctgtctttgacaggcgcattgtggccaaccagcgcacttgcggggaataccaacgacaacagcgagggatacaagctgagagaggacatcccagtgtcatgtctgaaccgaaccatgtaatactactcttcaatcaacctctagagcctggctaaccattgcttgttctacactcacagggaaggagaacatgtaagcgccaccagcctgcctaccgtctcctgacacgaagacagtagcgcggattacagaaaagcaggaggctaataacaaccgcgaaaacatccaggtcactgatagtctcggcaaactgcaatacgtccccttcgtgacctgcaatgaaaccgcccgtcctctgtctctccactacggcgtctccgaaacgataacatgcaccatcgactccctctccgatgagctctaccatctcctcgagttctacgtccacgccgacgtaccaatgagctgccgcgtgccaacagcgccgctaacaccatccggcggcgcagcagagcacgcggacaaagactcagaccagaagtccggagaagcagacaccctctccgcactagccgacaacgggccaccctttacgccgctcacaattgcgctacagggcacactccagctgagccacttgcacatctggacggatatgaacgtcgtcatgcacaacatggcctcggacgcggttgcagaacaaaacaccaagacccgcggcggccagtctggacagcccggttttgcagttggcggtattgcatactcgactcctgagtttgacaataccgggaagaatgccaagctcgacgaggacgaggagcctgttgctcttgctcaggcggcgcgcgagccttggactgctgggcacggcactaaggttgtgcgtggagagccacttaccttctctttccacgtcgcctggttggagggcggtgctagtatcgggtggccgacgcggcctgctttggagtcgtggctggctttggcgactgggtctgggaagagctctgggtctttcttttctaagcttgtgttctttgttatggcagcttctgttggcgctttagttgcattgtactgggagcgcaatggtgctcgtggacgtggacggaccgtctggcatggagatgggcttttgggcgggactcccgcgcgtggagtgaagggctctggtgttacctttggcaatggggggaagaataatgggtacggtggttactctggccctcctaatggtaatggtaatttgaacgggattggtggatatgggttcccgagtgggaagaaggattgatatgaggaactgagaggaatgggcgtatagcctgggtacatataaagtggcgcttacgacgtgtacagtgtacctaacttgaagaggccgaattgggcactagcaaaaagagctagttgtctacatatcatgatgctatatcccaagtgatcgagtcaaacaaatccgatgcattccatatctaatgcaagagccaaatttcaacagaaaaatcaagtacctggataatagttgtacaagtaacaaaagaaaacaccatttttcaggccaatgccacattgcccactcagtccatcacccgcaccagtctcttcagtatatacatacaagccgagtggacaagccgcagcacaaaatcccaaagcaaagaagcagcatgaaactaccaaccctgcgcctgcatacgctgaatcttcttcacagtcccctggaatgagaacttgaacagcttcttccaccgcatcatcttcttctgcttgcgcaccatacccttccgcacatggaacttctgctggttgacatcatgccgaacgctattctgcgaaagagtagcctgaagcttgcgcagcgcaccgccgagatcagtaccacgctcaggctcaacatgaacctgacgaccaagcgtcggcccaagctttagctcgaccttgcgtgtaggtagaggtgccctcgatcgcgctcggtagctgctctgtgcgccttcaccgacagcccgggaaagcgagtctgagaagatccggcgctggttgctggatacttctcggggcttgttgagttcgagtctgttgaggatgtcgtcgaagtcggagaccggcttttgcgcttgttttgcggcctcgggggctgtgcttggctggtcggtgggagatgtgggtttgaagggagtacttggtgatgaggtggaggaattgtagcgcacaccgtttgcgagggaggcgacccggtgcagctgtgtctgctgttggagccatggtgttggccgggcgcggaggctgcgggccaggaggcggaagtccattttgattggactcgctcgtgttaaaggagcaggtctatgcgggtgaattggactgtctcctgggatttggagtgagagcttgatcgaggtgggcgcgcagggtcggaggtgctcgaagttgcttgccgtaacggaaaatcatcgtccccgattggaaaggaaattgtaggtcacgtgccataggcttttggggcattttctagagatcgtgaatatcacacctgcaaatctcgtggactacgattatctctctcatctgtatttgaatagccttcttcatatacaaagtccttgagaattctgcccagaaaaggaatgtcatccatcacaatcgcgactcttccccgcatgggccgcgatgttctagcggccctgctctcaaacggcgcatcaagcaatctggcgatcatcgacgtccgggactcaggtaagcattattgttttactttatagtcaaagaccaccagctaacagttgaagcagaccatgttggtggccatatctactcatcaacttgggtccccacctcaacgctggacgtgcgcatgcctgagcttattcgcactctgaaagacaagaaaacggttgtattccactgtgcactcagccagcaacgcggtccctctgctgctcttcgctacgcgcgcgagcgtgagaacgcccttggcgcggaagagaaccagaagcagcaagtatttgtgctcgagggagggtttgtggaatggcagcagaagtatggcaatgatactaagttgaccgaggcttatgctgcggatatctgggaggaatattgagtcgggccttggctttatgcatctgcctttttacatgagatttaacgaacttgataacatagataccacttagatgcattgatagttttcatcttttattttttattattgtgggaggttggagctgagcacctctgtttggttgtttctgtatgttgggtaagtccatgttatttaatttgatggacgatgaaattattgtacatgagatggtctacgctccagtctattatatcacaagaggaatatactcgccgatctacatttggatgccgcctccgaaaccgactggccgtctctttcctccattttcaggtacaatggccatgaccttgtagatctgtcccattgacccgccatccttctcaaccaatcgcttccaggcggtctctagtgtcttcttgtgctcttcatccggcaccttacggagaagctgccgcatgcgctcttcaatacccatggcaccgaggaagtcaccctgttcaacaggaccgtgaacctcaacgccgtcgctgccttcgatggctgcttcagccagcgaagtgaaatccacatccgcactgacatccactcgccctggttcagaaagtggcgccactttctcgtgacttttgattccgcgcaaagagttgatagggatggtcgacaatgtcccgtagtccatgattagggctgcgccagacggagtcttcttctctgatgacgggggcgggctagaagcagagctctttttcgcagcaagcgcagaggcagagtcgccaccgatacggcgtgcaaagtccgcagcataaattcggctctcggggctgatctcgatagtcgagcctggccgcgacttgagcgctcgataacgctgagagatctccggaatcactagtgatgacggcgtggaagctttggctttggtcaattggaactcgggctctccttttatgttttcttcgacagccttggggtttaaggtcaccattagctcacgccattgcggggtgttggcgggcttgggcggattgtgtagttctgctgggccggtgggagtcatgatcgttcgtggcgcgttggcctgctcattctctggagatggcggaacagattcaaatgcatggattggaagtgcgtcgaagaattcatgtgcgaagatgaagggtgtcttgccttcttctgtattaccgttgtctttggtcagtatcagaaaaacagtggactgatgtaggatcaccactcaccatgcggcagaaggcgaatatcctccacccagacaatgggtacatcaaagtacttgcacacactccggtgtccgatatccgtctcctccatcactgcctcctcgccgcacagcagccgcttctgcacttctctgagagttccgctagcttccacaagataaatagcttcaacactcgaagagaagctcttgaagtttcggaaagtctgttggttatagaacccgtggtcagtccaatgagcttcttgtccttttcttttttgaggaaaggaagataggaataagtgcaactactcacccgtagcatatcatccatcaaagttccttttcctgggccaacctccatcagctgaacaccactcctcgcccgcccctgcgccatccactccgcgatagtccatataccgatcaattctccaaagacctgcgagatctcaggcgacgtgacgaagtcgccatgtttgccaaagacacctccaccctctcctcgagttgtataatatccgccatctggggaggtcaaaacctggcgcatgaatgccgcgattggtacaggaccagtgacctaattggaagtgattgatcagcaaaatgtacacacaggtaatgcgaaatgcagaagtaccttcatgacattggccaatgtttttgctagcggtgtggaccattctctctgttcaaacgtggagttccatcttcctgggaatctcggaagtactgcgttgcgaggtctgcggaggatatgcgacgctacgcgcctcgtggtttggttcatccttggcttggggttgagtggtgatatttgtttgtgctgccagatatgcaataactgagcttttcacagcaggcaaacagaacgtctgggccccgagcactcgttctattgcgtcgcgccaagtcgaaatgtttctctcaatctctccgcggaagctccatcacacgtgatcatatccttatcggactactatctgccgctagtcctaagatggtatggctcggcgatcgaaggccctaaaagactataacatgaaacaagcatgtaggtagtaataactatgtagtatactgaataattcaatctattaacaactgcatagatttagcgagtattctgtcatggtcctgttataacctaacgcagtttatctgtaagctccaaccttccccaaccttgggaccttccaaggttggttttccatgggtggcttgacaggcagcatcctctctctttcctttcacctcagtttggcttcactagtttcctctcttccccatctctcgcctcagtttgccattcaccagtttgtcctctctcatcataaacaactcagtgtgacgttgatccaatatgcccaccactcgtcagaacaggaaaccaaatgagacccttccgccccatattgcacttgccaatgacctcctcgagcatggggaagctctacatatccttgagtcatctcgagaagtttacgacaccttcaagccaccgaaacaatggggccatcgtgacgttcctataaaagatcccgctgagataccagaaggctggacttcatgcgatctagatattgccgaggagtaagacctatgccggatttctttgtttctcaactatttgctaactgttccgtgacagtgatatcgatggcatgattgaaaggtgttacaggcgcattgatgagggaatcctgcccgacatttgggaggacaaattgaaaatgtaccaaagcatgaagcaaacccagacgtaagtaaatcctactatgctttctcatggcaatggctaatacgctctcttatagagatatgatgaactccgagcctgccggtctccgctgggaagtgattcagcgccttgaatctctggagaagatcaaaaagcacttcgatgagtttggaaatgacaatgggaataccccgaacgtgatagccatcatggccgcttaccgttctggagaccttgtctggagtgatgatcctagttcagtcacttactgggctcacggtaagatgattactggtccccaaaaaatggaaatggaagaattcctcgctttcagtcaggagcatggcccacatggcatttgggtggaaggggtgagtcatatataagaaagacctgagccatggtccctatccatatacagcactaacggtgacctcggcatttatagatggatggctacaaacatgagccgctgggcctgtttcaatgtctgcccccgttccatcccatatagtatgaatggctttctacagcagtgcgtaatatgaaagtcagcggcttatacggctgtatagccttcttaatggtcttctcaggtagtattcccgatagtatttttacatgtcttttagtggtcattttagatagtctccttaggtatgctttctagatgcctagttctatggacatttactccccgatttttcggcgtttctcggttctataacgagtgatggtgcgggcttggggattggattgtcagaagttacatactgcttctacctatagtttcactttttatttctttcgacgcaggtaaataagcaagtggcgaggagcgacaggccactgtagcatgggtacaaatcaacctgcatgctgaagaaaagcccttaataaaaacattaatattttgttcgatttgtccagttcgccgctatctgttgcaaaagtgtgctccgaatgctaaaaaatgtccataaactgctctgaccatatcatacatttcatgagtgcaagaagaagcatgatctccacgaccatttcgcacagtggatactccttacaccgacaacgctagccaacctcaagttatcgcgctcaggcttgggtgttcaacgacgccatccccgctggttctggtgtttcggggtattccgcgccggcgcatcaaccatcatctcatcgctgtagagtccagtctgcgagtttccctggtcatcgtctaggaggtcattcagatggcccgggccacgacgggctcggagtcgttcctgatcagcttgtgcccggagtgcagtaaagggatcgtggtgggatgcggctttcggcgatttaagggtcattgtgagcagtctcccgtcagcctaagcacgagtcagcattcatacggcaatatcattagtcgggaacagcatttaccctctggttgtggaaattggcaaccaccagctctgcagccgtcttctctgcatatgcaaattccgcaacaacgctcggctggcttgctactatttggcagctgagcatggggcctgttatgggctcaagagcagactggatgtcggcagctgttgtcccaggcgcaaagttccttccaacgacatagaatggtcccgaggcacccttaatgctcatgttgctcccacggccgctgagtccgaaatttcctgatcgcatgttcccttggccgttctcggtctggaaagctgtccagacctgatctgcattcacacgatccttcttgccaggtctgccgcgtgtccgattgttgtccgtggtgggttgcacggtcgctggcgcagggcgctagatatcgacgcgagagattgtcaaagagtgttctccaatggtaatcgcattcgtggtcccatggcggaattgttcataccttggttactccgatcctgcttgctaagcttccaggctttggtttttgtaatttcttctgcgcttttttgccggcgccagagcctgagcctggcgcgcttgatctgcggttctttccaaggagttggtttgcgagctcctcatgcttctttttttgacggtctggggaggaaacagtcagattttgctaggtgttgttgggtgggttggagaatgattaccagcctggatgatggcgtcgaacgagacgggttgcttggtcgccatcgcaaaaatttagattagacaaattaatagaataaagaagaagaaataaattcagaaagcgacaatgcgtggagaggttgaagaagagaagaagcttggggcgccggtcagctttggggcggagctatcaaccctggccgcagctccttgatgtctacatagccaactgggcacatacacaccggattttaggccgagcgagatggctttccctttccgttttagtgctcaccccttgccgctctttgctcactgagtaaaactgagcacgcccggtgtattacataatcatcgaactgcccaggtgcacaggtgagaatagccccagcatcaccacctgagcgctctggtttgctcactgagtagccttcagggctgaccttacctaggtactcactgagcttgacctacctaagcagtggacgacctgattcttgatggtgcggtacgccaagcggccaggcttgagctcgagaattaggtatatttcactttcgtgccttctgagacagatacatattggcaaatttttccctgactatgaatatatgagtgctcaactatggccctccttcacaagttcatattagcgcgtgaacaaaccaagcagcagaatcaatgaatcgccccaaaacatgacgtaaaagccttgtcgaatctcagaacagagagccaagccgctctatgagcttagtgacgagttctcgatcagcagtggccatggcagcaatatcagcttgtgcccagccatccgccttggcctttactaactcccacacatcgtgcgactcagcttcatttgtctccaaaaatcgacacactagagatgtagcaatcaaacgcgaccatttttcaaccgcagatacctcgttcgtctcaattcccgccaggaagttatagtcggtttgtatggttacgcgggcagtgcttggatcaaggctcatgacctgtaacagagcatcgctcatctcccagtaaccttcaaaagtctggagctggatgagttcatttaacgggagggttgatgccgcatctgcgtcttcatcgtattcttcatcgtcgtaactgggtgacttgggtgaataactaccagccgcagacccatatgctggggacgcaggcgagtaccctgggcttgtagcgtttgtagacttgatgggggcgcaagctaggcggagacttggggagctaggtatatcaccaggggaagtaggagtgtaacccggcgacggcatctgggatgttctggtcttttttctcttcggcttgaatctagtcgtgttaccggtgttgagaaatgtgtcgaagtcaacggtttgcaggttgtctgggctgtccattgcgctgaagtccaggttgaatgcataggccttagaaaatggttagtgtatgcttatacaaactaatgaccggaagggaaatttgcataccttggcatcctttgagttactatcatgctcagccaaggccttttcgctcaccgcgacaaatgagcagtgtttccctgcaatttggaatctcacccccagacgctcgcattctgcctggaccagttcatcaaaccgactctcccattttgtcttaatcagctcgcattcggcattctttgcggagtatatccagccgcgggactcctcaagctcggtgatcgtctttttggccgcgagctgatggacagtttggcccttgccaatatcttgaacggggatttccagctctaggggaccgtgtttgctgtcagcacgaaggacgatcgtctccggaaacgggtcaatggactgtgagagaagcaagtagatattggagcgtatgaatgggaacagagccggaaggtcgtgtggtgcttgcaaaatgctaggaacagcaattttcggcagtggctcgcgcagatcaccaattacttccccttctttatgatcttggtcgaatagggaaatttgctttggagggggctccgtgtctgttgtatcatcaccaggaagtccaaccttcacgaagtcgtcttcaacctcaacgttggaaatgtccacatccagtctgctgttgtgcagtcgaggcatcaaagcgcccttcagcattcgaaccactgttttgtttaggtcctcattattcaggaccgtctgggtaaagcctttgcccgctctggagataccattgataagggagtgggaaacggaatccccgaggccgagggtgaagaaccgagtggaatgctgctggttggcctggttgaccagatcgaagacctcagactgattccaaacctcaccatcagtgagaaccaatacctcaaggaccttgtcttggtagcgcttctccacagctgcttcgaggccggacaggatttcagttccacctagatcggcctggatgttcttcgtatgctgaagagcctcttctaggctctctcgggtactcactttgcttcgagcccagatagcttcaaatgaggagccaaacgagattaagttgaaaggtacgcccaacggaagtgacttgagaaacaggccaagggcggaacgtagagtatgcatgttatccgtcatacttccactgcgatcaacgacgaacacgatttcagataaatccggtggcagactgaactttggtaccagggaaaccattagtgccttctgatttggcaatgtggggtgtgtctctaggaaagcaaatgggagatcctgtttgtccgcgttgacggtgataacgaaatcctcgtcaattgtcacattctcacgaagtttgattgaggcatagttcgactcaaaagttgactccggcatatcagctgtccggcccaagtccacctggattggatggcttggtgaccgtatattgcggatattagaccccttctccatgacaatgtccacggttattgctgtttttacgaggactccttcgggcagatgcggaatcccaactctagttccatatcggggtccaatagtgacggggatcgtatatcgaatgccatttgtcttggcatcctgggccagttcttggatgagagtaatctcgacgagaacggtaccccccgctggaacatttccgaggtgcgtgctgaagacatcggcagcactggacgaccgattgagcatagcagcggtttgccccttagactttgcttcttgatatatctcttttgccttttcttttggcttgactattccttcaatcacagtatcgcccaggcgacaagtgaagccgacgatgctagagctttcatatagggggaacgagtagaagacttcggatattgcttctgtcgaagaagggttcacaaaggtctgtgtgattactgttcgtgaattgctagcgagaatagttgcatgcgcgtcaaggccaacctgaggcaggtatttgagcgctgacgcatttgcgacccggtaaaaacagccgtgcgccatggtacggagagttgtagaagggaaaatgaaaacggggaggcgcgagatacttatatcgatgggcttgtgaacatgactaacaggtgctaggctgcagtgcgatgctggcatccttccccgtgagactatgctctgattggcaggtttgaggtttgcggctcaagtgagaacccacttgagatcacctgctccgtacagattatccatggatatggctccagtactccactccatacggtcacttggcttaacaaacactttatgactacagaagaaaaggactgtgccaaaagccacccagaagccgcaaaatatgactcgattcattttggcccccaattttccgatggaccaactagcgggctggaatccacttgtatttctgttcttcccggaggttctataagttctaacgtcctatttgagcttatgaacttcgaagtcggtgggaaattccacttcctcgttttcttcaggacaggccattccgccacgcagtttgctcgacctcaaagtcggctgatagtggattctcagcactacatgtcccaacttggacacggtaacgaccgatctcttgaacccaggcgtttctatgttcatcccagaaactggtagcatatttcgtcgggatcttgacagtcacagtttcggtctgttgtgcgcagaggaacaccttctcaaagcccttgagctccttgggtggtcgattgatactcggactctgttgggaaacataaacttggagaactccgcaccatcaacgttccagtgttctggacattgacagtgaccaaaaactcctcgtcagtcttttggagagaaatcgagcttaacttggacgtggtgtaactgagcccatggccaaatggaaatgcaacttccttcttgcatttttcatagaagcggtagccgatatagacaccttcgccgtatttggtgctgcctcgttcacttctgaagttcaaaaacgcggggttatcttcattgtggtgcgggaagctaagcgacagcttgccactctggtttactacgccaaagacaacatccccgatggcattcccagtctcgttgccgccgtaccaggcctatgtctccgttaagccacggcatggccatgggagttcatgtagccattagcgcttgtttatatttcctatgttattcaattgtgttttctgaaatatactgacgttaaattctacctgattaaaaacttgatggagacctaaaacaggacggagcatatctccgactgatatggtacaatgtagatcaacccaaatgcagacaatgaagccaaaaaatggtattatttactcttatgatcgaagaaaagcagttatcccaaccgaagactaaatccggcccctacttcaccggtatctccacccggagcacctccaaatacacccgcaaagtccagctcgggtgcttcctggccccgtttaggagcctcaggtgtgtgatgacgtctccgtttctccataccggccttggatgggaaagtagggaacatctctcgcggtttgggacgcggatcttccttgaaatatttgtggtcgaggcactgtcttgccgtaggacgggaggtgggattcagcgccagcaagcttgacatgagactcaagcccgcattggtcaggtaagggaaccgggagcgaggcagcagaggcgggttgccggctgaagaaggtgccgatgttgacgggagccgcaacgacttggcattgggcaatgaacggaatccaggccatgttacagggttcggtggcccggtcaaggcaaagatcttggacacctggtccacttcgttcttgccctgcaagagaggctctttggtgagcagctcgccgaagatacaaccaatgctccacatgtcgatctccgtgccatatttgtccgcgccgaggagcagctccggcgcgcggtaccagagtgtcacaacgagctgtgtgagcttgggaggtggatcgccaaagtagcgggccatgccaaagtcggcgatcttaagttcgccgcgattgttcattaataggttggaggttttgaggtcgcggtgcatgatccactgtgaatgtaggaattcgagtcctccaactacttgcagcaggacggtcttgatttccgaaggaaggaagggctcacgcatctcgtcgagtagggctttgaggtcgtgttcgtggaaatccatcactaggaatacactgtcggaaccagttgattagcatatgtaatatagagctgtcacagataactcactcgtccattttgttgcccattactacttcccgcaggtaaacgacattttgatgtcgcgcctccaaaagtgtttggatttcccggagcccagtgactgggaacccgtccggcgagttctccagcttgagcttcttcagcgcgacgatttcgcccgtggaaatgtcctttgcgcgtgaaacccacccatacgagccctcttcaatgtggttcaatcgttcgaagttgtccacatgtctgcagggaccccattctccaaccggaaagcgtagtatggtcgactgtttctgctgctccttctggatcttcaccaattcggcatcgtctggacgggcatcggggtcgttggagagtcttcgtcgctttgtcggggggcctagctcggcagtggctttagcatcccgagcttgagctttgttggcatcttcaagtcgctgtttctctgctttggcgcgctttttcagttctttctcgcgtttttgttgcgcgataatcgcctctgtttctgggtcgtcatttgcccatctggacgacatttttcgtgagggagaatgaaaagagagaagttccggaatgacgttgcggcagaagccgagttcgatttgaaatccaacgccccgccttgaatttgtatagcccattgcacatcttctagtcttcggatctttctcttctgaaatattatctctctctatctctctctataacctttaccttcacttgtacacagactcctatacttgccgccgatttcgcatctgtctcttccccgccatgatcgaaccattccaggtcagcctgtctgagcaacatgactcacaaacgcccaatactaacgcaattttcttgtctagacgaccttctcggtcccaatgacctgcgaaggctgcgtgaagtctgtctccagctctctgaacagcctggaaggtaaacatctcactggaacattccacacccagcagctgaccccgcgacaggaatcaataaggttgaagcgaacctgaaagaccaacttgtcttcgtcgaaggcaccgctccccctagctccatcgtaaccgcgatcgaaagcaccggccgcgatgccatcctccgcggcagtggcactacaaacagtacggaatccctggttcccaagtactgtcatatgcgacacagatgagcaatatcaactaatatataccgtaaacaggttccgccgtctgcattctcgaaacacactcaacaaccgtctcaaacaatatccgcgggctcgcgcgcatggtccaggtctccccgaacatgaccctcgtcgacctcacaatcaatggcctagcgccaggcaaatactggacaaccattcgagaagctggagatatctcccgcggcgccgagtctaccggtggtatctgggaatctctgaagaacaaggtgcttggcgctgatgctgcagccccggccaaggagtgccggggcatatttggcaccgtggatgttgacaataagggccgtggcagtgtgtttatggacaggcctgtggcaatctgggagcttattggtcggagtatggttgtctcaaaggggacggagggtccttttaagcgtgaggatgagaatacccttgttggtgttattgcgcgcagtgcaggtgtgtgggataatgataagatggtttgctcgtgctcgggtaagaatgtctggcaggagagacaggagcaggttgtcctgggtatggcttgagtgggttctggtctttgctttattaggagtggtgttgatgttggtggtgttgtcactttttgaacatgttagccaggtcaattgctcagtgatatatgtagcttcaaatatgtgataccatgaagtatagatgaggttatgaataacaagatgattttaccttgtgttgatagaatatcacataaacagacagccagcattgtgcctataccctcttctcttcttacttgtgttcttgttatattgattggttaaagcagtggaaatatataggcaaccagagagataaaatcaaagatggagtacccttcacatttgaaccccatatttctcagtgactacgtctgttctgggatactctcctatctggagttcattgtacagtaaaacaatagcacaaagggtgcagaagaggtgcgcgcaaaatacgtcaaaaaagagaatgaatttgttaaaacatcgtactagctttgctaaggcttggtaagtaataatacatacattgtgtcctcaaggggacaagggttaggccgcgaaagactgttggcgaaggatttcaccaaaactgtcgtggctgcacaattccagggtaaaactcatcgtccgtatcctcttccacaaaatcaaatcctgcactggggatgccaccaaggagcggtagggacatgatctcttgactagtcatctgagttggttcttgagggtttctagtattaccgcagttgctggtggtatgctgtgcggatttgactagctcatttcctctgtcagggtaatggctgcttcttttgctgccgtcaacaaggaaatattcgtttctatcctcaactgggctcgggaaaaggagctcagagtcgatcggggatggggaaaatgtatcgttcgtcgtggattccattgaagtcatttcggtcgatgtgacatctcgcgatgcggtatcggtgggtgtgtaatggcttgaataatcttcgacacttgaccgttgtgcgcttgttctttcgaagatagacgaccatctttggccgaaattccggttggagatgtagttgaggggattgggataatagaacggctgtgtctcttgggaatgggtgatcgaagttcgccggggcatcaaaggtacgagactttcatcttgttcatggtaaggggggatgttgctgtgtgtatcatcttgaagcacaatgcgttcgagtgtgccttgagaggcgtacgaggcttcttcttgttcgtggaacgcgatcatgtgtccactggggtcgggaatgtgttggctgaggctggtattgtgttggctagggctggaactgtgaaggctggtattggaactgttttcactgttggcaatgtgctgactggggctaggactaccatgttgtctggtccattggttgagcgcctcatggtatactccagggaatgcaaatcgaacttcggtggaggactgtctcgagatgggaattgggcttgatgattcatcactggtttgtgtatccgaactggtattttgctgttgaagatttgttgcttgttgctctccacaaactgactgaggatctgccaggttgcgggtggacattttaatctcttcctcagtagagattgcaacgcccaatgtctgccgcactaaatggttttctgtggatggcgtggtgtgagctaagtgatcctcagaattcatattcgcctccaactctccacttccagcaaattggaagtcaagatcatggtcgttggcttgtggatgagtcgaggctgcctctgaatgacttacagctcgacttgaggattggtagagtgcggacgtagatgcagatgcggggaccgtcgcgaacgagccatggatcgaattgatagacggaacgtggacaagagactcaacttcggtatgggctgatggaggaggcggtgcgagatccatacgagatagttcggcgccgaagttcatgtcttcttgtgtctcggaagtgtacgctccggttgaggctccctggcgttgtcgttcgcgcctgagagcaacggggctaacaaaacccttctcggtattgctttcttcactggaacggtgtctaagccccgatcgcagtgccatcaaacccgaccgtgctctatggagagagcgtcttgagattgattggacccacgccatcggactgcgcgattccgaggacgaatttcgttgctcacgggcattccacgacagagtcgatatctctggattgtgacgaggatccaggggattgaacacagggtaatgaattctttccatgcaagttggctcttcctgcactgcagcagctacactgttgtcttggttagcaggatatctctttcatcttttgtcgttctttgtatgtaattacctagctctcttgctttcctgcgtttcctgcgagcggaagactgatgatagcgagaataaatggcgacgtatggtgcgagagcctgtcttctggttgacgggactcatcttgttcagattgctttggacgcctatccaactgttcgaatcacaaaggagatattatgaaaggatgtgaatgatcagcgaagatagatgacgattatgccagcgcgtgaatatgtgacatgaaagaaagtgaaaaggaaaacaacagacttggatgtttactcaaggtcaggagattgcagtcgaagggacgcgtgattcgaaggtcgagattgatcgttcttgccctcgacctgcatactccgcctttactgatgggacgaatacattgaaggactgtgggttccttaataagcttagccagggaactatcggctttattcaatttctacgatcgagtactttgataggctagaagatggcaaggaaaggagcagacaactataacgttctattcataaggagaactaaatctagggttcgccatggcaacgtgaccaaacccgcgacagcaagtgcgacagcaacctaggtagtgcctatgtaggcaacgacaccagccgcccaaattagaccgcaggggttcgccatagcaactgaccgtatacgcggcagggacaaaaagaaattcaaagataaacgtgcaagataccagggctttattgggctgtcatgaagctcaacagacttgcaccttacctaggtagtgcatactctgctctcttccaaatgcagactctgttccgaaaagaacacttacagatcgtaataataaacgatgcttggaacgttgtttgattcttcgtaaggatatcattttcctgtcacactggccattcggagctatccgtgtgcagctcaattactggctcgtctcgggtacagttgttgagcgggttcgttgagcgttagataggatgggtaaacaccagggtgcagtagagaagacaaaaggaataactggcaccatatattagtgtgaaacgagaagaccagcaatgatgttcgtatgtgctttggtcgcttcaatgcgccgagacggtgggtatcaatctagtctatcaatccagtcatatcggcggtatgcagaggggagggaggctctctctatattgaaggtgagttgcgaggggtaaaggtgcatgactatattttgtctgaatgtacgaattacttattgaacggagaagacgtacaaacaaaaagcaatcgtagcctacatacatggatttaggcaatatagggtgatattcaaaatctgggagttcaatgattgtatacacaattagtaaagtcactgcacaagtagtaaaagatttgtccaaataagcccgaaaagtctagctttcaaatctatagatggaagttgatttgggctgctcacatagagagtcgacagagacgacagataaatcttaaaaggactgaggtatcggccagaagcagagatatgggtcaacagtttctccaattttcgtaaagtccctttacatccagtctggttaaggtgaattggaaggaggaaaagcaagcattgtaaaggaatgccagcataactcccttcgatttgcctcaacgtaagatacgatgttaggttgaacatcccacctcgaagccaatgaagagcttttggtttgcgctgagcacgctagacagagtcgagcatagatcgagtttacatgatcggatctgccaagagagatctgacccgcgatcgccaatgaaacccaaacggcaatctctaccgccttgttcccggattaaccatatacttgagtggggataagaatggtcaaaagtcagagatacaggatatactatcaagggtcaacccgagaaccttcggggtaccgtggatgttgtttcgcgcaaacacagggatggggacaaccgtcagagataaaagtactgaagtattgcagatgtcgagcttcacgcacatcggcgtctcccgtccgacaaggactagaaagcttgattgaaaggcatggggtttggcttgctgccaatcagggggtgttatgcgaatagataagagtacttggagaggtcaatgcccagaagggaaggatagaagaatacctacagtcactatcaagactatcaagactatcaagagatatcggaagtcggaagttcttatctgagccgtgagacgactactccacttttagacccgcttcaccacatcctccaatgaccatccgacttcgagtccgagatgggaagcgagtgcagaatcctcgggaattctgataagctagggctatcaggagggttatgattggttcaatggcgggtaatggatcccttgctggggccctcaaggcttgtcattcggcttgtcttctggaaattttctttttttttttttcttttttcttgcaaggggcacacgcgacaggcctatccttgccacagtgcgagatccccagtggggcccggacgcgcaaagaattctcgcgactatatgaacagctcctccctctcggtggggaaaaaaaatggaagagaggacaatgtgacactttccctatattcaattccttcatctgatctcctgggtctcgctgagcctacccagctcttcgattaatcccatttatactctccgtctccattccattcttcaccttcattggtgaggatttgaccgaaaaaagatgctttcaaagttcgccaaaccgttccgcagctcaaatgaggacctggaaaaagcaccccaggtgaacaattcctccgatctaaatagcaatgaggtattcgacaactccagcgatggcgccgtgcccggtgagagcttcgaatacggcgattcgatgtatgccaagatccagcgcgtagctggcaagttcaacatcgagcagcgaggtgttgagcgggttccggattatgagcggaccgatacgtcctatctcaatattggtagcatggtgtgttcctgcaacaattaccgggcgtgatcgccttggcctggaggccttttccactgaccaaacctagtggttggccgccaacatggtcgtcagctccttcgccattggcgtccttggaaaatctgcattcaatttgggcttcgttgatgccattttggtctgtctcttcttcaacctcctcggtgtcatgaccgtgtgcttcttctcgtgcttcggtcctccctttgggctgcgccaaatggtgctctcacgattctggtttggatggtgggctgtgaaattcagtaagtcatctcgggatgttcattcagtgtgaaatggtcatgttaactagtagctttctaagttgccatccttaacattatcgcgtgtgtcggttggtctgccgccaacgccatcgtcggtgcacagctcctcaacgctgtgaacgacgaagtccccggatacgccggtatcctcatcatcacattctgcacactatttgtcaccttttgtgggtacaaattcgttcacatgtatgagtactggagctggattcccacctgtatcgtgtttatcatcgtgttgggcgtattcgcccactcgggcgatttcatcaacatcccaatgggagcaggcgtttctgaaatgggagcctgtctatcctttggatctactgtctatggtttcgcaacaggctggaccagctacgctgccgactacaccgtctaccagccaaagacccagagccgtcgtctggtcttcttttctgcatggcttggtctgattatccccctgctcttcactcaattcctcggcatcgccatcatgtccgcgacggagatgggcgacggagttaacaacaagtacgccgaaggctaccgagcctccgtcaacggcggcctgatcgcagccgtgcttgagcctctcggcggtttcggcaagttctgcctcgtcatcctggccctgtccattatcgccaacaactgccccaacatctactctgtcggcttgacgttgcaggtgttgagccgggctacgcaacgcgtgccgcggttcatctggactttcctcgcctcgtgcgtctcccttgccatcggtatccccggttacgaccactttgagaccgtcctcgagaatttcatgagccttatcgcctactggctggctatttactccggcattgcgctcgttgaccactttgttttccgacgtggattcgatgggtatcgtccggaggactacgataaccccgccaaactccccatgggaatcgccgcttctattgcgtttgtctttggcattgtcggtgttgttgtcggcatgagccagtcgtggtggacgggtcctatcgccaagcatgctggagacccggcgtctggtggtggtgacatcggatttgagttgggctttgccttctcttccgcagtgtattgcgtcttgcgacctatcgagcttcgtatgattggtcggtaggatcgactcttatagtatttgcgttttgcgatgtacatattgggttggttcgggatgggttcttggatttgtgcataggttcggttgcattagtgtattatacatttgcatagttgcatacagcatattgacgttcaaatctatatttaactgtaagtttagcacaccgaccttgaccattgatatgagttgcgagaaaggtttcttacgtagctgtcatttgtcctctctacgccactggtagaaccctcgccgtcggagtcggaggaatccagaaaactccccacttgtggttcggtacaatatcaagccgttctgcccatggatgtcaacagtaatcgggcatattgtattggagagctcggaaactcttcgctttcattggctggctacgccacatgtgggggcttacagcatatttcccaatcgggcaagttgatatttgacctctggttacaggaaccgtgcacttcccaatatataaagcaaagcaatttccatagaattcttctcagattgaaacaggatttaccattccgagccagtccaccatactttaatccaatattgcgcgtgacacatctagccctaattttatacttccatcatgtctctcgactataaccccgaaaaagagatccccgatctcacaggaaagtcaatatttattacaggaggcatgacctgattctttctgctttaaaaaagtccataattaacagccaacctaggaaccggcggcctaggcgcagcatcagcaatccacctcgccaagcacaacccatcacacatctacctcagcggccgcaatgccacaagcgcagaaaaagtgatcaaacaaatccaccaaataaatccccatctcgcagccacatttatagaatgcgacctagcctccctaacctccgtcaaaaccgccgccgagcacttcgccaaccaacacagcaccctagacatcctgatgtgcaacgcgggaatcatggccctacccccaggccaaacagccgacggctatgaaattcaattcggcacgaaccaccttggccacgcactactgataagaatactcctgcccctccttgaagcctccgccaacgcaggcgcaaacccacgcattgtactccttacctcggcgggctggaggatgcatccgtgcggcgggatcattttcgacaagctcaagacaacacaggatatggcgtttggcggaccgtggcagcggtatggacagagtaagcttgctaacttgctgtatgcgcgcgagctcgcgaagaggtttccgggtatcacgtcggtgtctgcgcatcctggtgttgtgcagacgggtctagtggatgaccttcggattaaggagaaattgtttgtttatgcgactacttggtggatgattctgcagccgcatgagggtgcgtttagtcagacttgggcggctactgtggataaggctaagattcggaatggggggtattatgagcctgtcgggaagttgcaggatgggaagcttaatttgacggcgagggatgatgcgcttgcggagaggttgtgggattggactgaggaggctttgaggggggtttgattttgtgttaatagatccaatctgggtgggcaatgtcacgagtatatcatttcaagaaaggaaaggaaatggatgaattcagttgaattcatcgaagtgctcaggcttgaggttgttttaagggtttcctgaatcacttcggcaacctcaatctaccctcgcgcgtttctcattcgtctgctctcatacatcggcttggcgttcttcccttttgatcctcacatctcatcagaacgatctatgattcgcaccaaggctcatactctgaggatttattgccactagggccatgagaaacaaacataaataacagttccctgtccctaacagtaactcgccagaatctctcatttgtccagttattgtatctattctcggtccctcatcaccaatctttcaacaaagttacctctaatagaatggatctatcccgacattccctgtctggggatattgaacaagatgggagtaagggtttccaagtcaattgatacctcgaggtttgttccactaggaatatatttctactgtgcatgtacatattatagcaaaatccccacataattattgcataatcttgggctttgggcgtataaattgaaaaagcccatggactcgcatcccactcctaggatcaaacacatcgcagacacgaggtaaaagcagtttgtagtcatgggacatccgaatcatttggcgagttgtcagtcccctggaggcgtgccggcggactgctttggctataaactgttggaactgttggttgattgtccaattgaaggattcgaggcaagcgtcaattggataggaggtttgttttctctttgctctgtcgcttttgtgccgcgaaatcatgtttggacggattgtatgctttgtatctgggctttccctttcccacaagctgcaagtaagcataaaatatttctgctatattgactcgagacttttgagggtcgaaaattattcgttcaagcctgtcattctcagtgcaggccgctggtaccggctggacttgtcgaagagtcaccatgctttgtttgccaagactgcgatttaaattgattcaaatggtatgtaattgagttcccaatctcaattcgtcctcagaatgaagaggggcgtctatttgtgaattgagaggcagattcagtatattttgaactagaacattgattttgctaaagcctcaaggccgttatttggactggaaaaagctcacttacaaatgcagaggctcgaaatctagaatgaagggatggaaagaaaatgcgcacgccaggatacaaggtagaacatctaatgtttgctttctttggttttgttgggatcgaggggtccttgttcagaagagtgagaccgccgaagagaatgacaacagtcaggaaactctttgtaggatgtaaacggtagacctgtgaatttctgtatacatatatttccaaggcggctgtgaatgtaccaccatcattccttaatactagacacagcggaatcgcttatgttgagcaccacgctggcaaagttttggtgaaagagcccttgcactctgggtaggaaatactgtgtaatcgagctttcaacagcagccggcagcaaatccttaaaaatccaatagtgccgaataaactccccggtgcagtttgttttagccatctcagggtatccattcgcctcagcgcatgaaagagtttttattcctccttgcagcgcgttgtcataccgaagatgatttccgaaggcagcttgttcatgcgaccattgctgactccatttagagcagtcggggtatcgcatatcggtaggacatgattcccacgcttcaaaaagctcctgcgtcctggggtctctctgtccaataatgaagccagtgttgaggagtgtttttcctttcgcgtcccgattttgtggttcgtctgggtcgagtgccatggcgacgagtgtatcgggcgttatatcccagtagttgaaaagccattccatgggaaggtgcggatggcgaatcatagcatccccatcgaggaaaatgacaaattcgtagtatttgagggcttccttcatcgccgttactttgctccatgtgccatgaagacccttagggctagaggcctgaatgagtttgtaatcatagccatggattgtagctacaatggtcagtatcggattggtaacgaaaatacatagcagagacctaccataaatgtagtggcttagtctaccaattgtgttatggtgagcgcttgttgtattcagtcgggtcccattcaaaagttcacctggtccatcaagtgggcgggtgtcaacatccagaataaggattttctctctcagtggcttcgtaaacctcggcatttgtggtaatgagtaagtttttccattctgatcatcgaattctagggcgtctattgggtgtatgtagggtctgtaaaggtcttggatgaaggggaacccattatcgaccggcagcgccgagtattccctgcaaatggtcagttttcaaaatgaggtttccgcaaaataaaagacaacgcactgcaaggtatttctgaccgagaaatttcccaagcccacggaaaagtaaaacagactgcatagtaacgccgtcaccgttaacaagaaaacgaatggtcgcggcaccatggttagtgctgaaggtaatgaattgtttataacggtgatggagatccgcggacgctgcgcgctcaagagtgaaataacaggccatttagacttgttttgaatagatatgtaggagaattgttcgttctcgaacggtatttacgcaagcggacggaatcaattgggcggccgttgctggttctagtgtccatttaggataaccctggtttccgctctcggcggactccccttgcaaaccctcattcttctatattaaacagcaaaacctccttggattcttacatcgagcagcttaagaacaagaaattattgccatctttatgagagatccagggagatagcaaaaaaaaaaaatacaatccatacacagtttacactcaaccccaatccagcatattctttcactgttgcagatctgcaattgggggcatctgaataagaaatgacaagtcggtggttataagatacggctgtttctctagcctatcccttcgttaagacttcggctaagttctcgcgctatgacctttgatcctgtttgagcttatgaaggatctgtgatctactttcaaattatatgtaagccaacttctccccccggggcccctaggaagctagcgcgagacagttctagcaacctcgctatgatggagatccgtactaaagaacaaggtatatggattgctatcaaaagatacggaagaggagaatgagagagaaaggagctgagagctaccgctatctagtcataggtcatgtcgatcacggatgcttgatatactaggtattaaacaatagttctgtttagaggtcatggttataacagaaatttgttgagtgacttctcgaaagcagatggcgtatgggttagcggctcgtgttttttgatggtctatacctatttcggaaggcagctgtatatcgaggccctggcaagatgatcgaacccttattaaaagtccgagagtcccgtctcaagcagtgatggcaattcaaggctgctatcgctcattaaggtaactaaccactatggtccgaaagctggtcatggagatcgttcctgttcacttgctatatatattcgttttcgctctatgaacgggcctggcgggtgattactggagcggcgttcacggccaccccatcctgctagaggcccctacagtccatacattaaacccggcatagacaggccacttatcctggtaagcttgtcgcagccccggagcacttctaccagattgctgacaccgcgcgtgctggtcagtcggtcgtatgcttagcctgcgaagtcttcacctggctgccccaagaagcaggctgaagtctacccgggcatggtgggatctcgttaccgtctaccgggccatcgttatagcagctttgccctcttcatagcctgctaggcatagtattaccatttcctctgggaagctgcgtaaacgcgtatgagtggcgaaatgcggaagatgtgtctaggggaacgtatctgaggttctgcctttgtcgtcgacgagaacgtggaagggtactaaagcgatgattgtgccttgtgcggtgttaaaccgactgcgtgtttctgaattcgtcgtcatgcgagtcgaaatgtttcagcactatcttcatcttattgtgatggttgctgaattccagaatagcagcctcctcacgatcagcatgttggaatcgatggcaatcttcatttggttttcgagagtcccatgagatgtctgaacccttcccttggctgcaaaggtcgaatgatgtggcgttaacccctttcctggcgctatcgggcctgtaccacagacttaggggtcagaagaaggcaggaggtgatccaggacgcgaaatgcagcccctagcgagtcccacggggaatcgggaatcgaagcactcatctggatgggatagcacagaagaggaagacgtgatcagagtaagccctatgccaacagaaggggaggatgggatcagagtaagacccatgtcagattctgcaaacgaaggacggccgaaattacttgccgcccccccccggtgtatgtggcctaagagaagacacagtgtcttagacaatcatattcccagctcgtccatcatctcatcgacatccttgattggagcatacataccggaatccaatcagtgaattatgaatgacacaaccactcagtttcccacgattcatggtgtcggcaatcatctcccgggcgcaatctcgccatgggatactggatggagagataaccgagattcggccggcttcacttcaacttgcatggctctgatgcaagatgtgtgcggatcagatctcctagccaaaggcccgcacattcaacgtcgtgactggcgtggcgcgaaggctatcaaccttgttgaccagatcccctcttgtcatcgagaccggcagagaagggagcgtctcttgtcgaacaatccggtcatggcattgagagccagaagacataggggttgaatggcccctaagttgaccaaaaatgtgagtgtatcgatgtttcagacagcaatgccgattcgtcaagctgaagaacccttggaagcttcaaggacctgtcaggttgcatctctctcggacgtgacccagtctcagtcatcgttagaataggaagaagttcagccctcaggtcaaggatggttaatgcagtcaggtctcgttggcctaaatgatagttatgtacgccacggtattcttgtagctggccttgaagcttcagaagactgcccacgaaattagcagtatcaagttcggcgcccggacttcccatttgggttctgtgataatttctttgatacgacagtcgttaggagccgattttttcttcctattctttttcccctgctgtgtaggttggatgttttcgtgagggatgttggcctgaaagagttgaatgtcaaatcaatcactatcgttcgactgttcacccatgatgtcctccagctcgcccatccggcgcgtcttcgaaacggtgtgcttctgagcggccctctgagaggccgatgtacttagaaacatctcccaataatctggacctttaaccgtgaatgtttcacaaccttgatcagtttaaatgataaatagtgacacaaggtgaagtacgagcccggagatcagggcgaatgactactctgcccgctataagtattgggtttggtccgaaggaactgtgttcggggcctttaaagttaaatatttttgaaagcagcgcttgcagagagtgttaatattcggaccccgttgaatgtcatgtttatcattgggcaaacagtggagtggtgtcaatcttgtatcagtctagtagaaacgaggttaaagaaccttggaactactttagatggggctatacacaccgcgccacgtgattcccgccaccagccacaactgtgccacagtaaattattaaatccacaacggattcgcctttgaaagaaatccagaaattcagcagccgtaataacaccatcacttacaccatgtctccaaccgggaagtgagtatttgcagttccagtcctacaagaaacacgcgcctaacaaaactttctattttacagccgcgccgactgggccgacgacgaagatttcgatgacccctccgtgctcccgccgcaagaagtgatcacgaacaaggacggcaccaagaccgtcatttcctaccgctacaatgatgacaacaagaaagtgaaggtcacccgccgaattaagaccaccgttgtccgcgaacatgtcaacccccaagtcgccgaacgccgcaaatgggagaagttcggtctcgagaagggccacgccgccggtccctcgttcgacaccacctccgtcggcgagaacatcatcttccgccccagcgtcaactggaaggctaatgctaaggaggccgagaaggagggtggcgaaaagggcagcatgaaggaccagttgaaggacaagaaggtcaagtgtcgtatttgcagtggagagcatttcacggctcgctgtcccttcaaggacaccatggctcccgtcgaggagggcactgctgctgctcctggtgtcgaggcagaggaggatgcaggtggtcttggtgctggaaagtccagctacgttcctcctcacatgcggaagggcggtgctggtggcggcgagaagatgggcggtcgtttcgagaaggacgatttggcgactctcagagttacaaacgtatgttctgccatttttctgctttctacgggctctacgggcgtcagggtcgtttattttggttcggtattgacttttcaaacaggtcagcgagttggcagaggagaacgagttgcgggatctcttcgagcgtttcggtcgtgtcaccagagtcttccttgcacgggatcgggaaacccagagagccaagggctttgctttcatcagctatgcggaccgtggcgacgcagcacttgcttgcgagaaggtggatggctgtatgtcttcaataccccatttcgtgctttcctttctaccagttcctcaagtactaacccgtctttctgctagtcggttaccgccaccttattctccgcgtcgagttcgccaagcgcactacttaaacttctttatcggttctctcttacgactttttgaatggaacgtttccttcttctcaggcgggcctatctttgggccgaagctcttttccttgtactgtaggacctggttgataatgattcccaaaaagacatccagcatgtcagttacttgcattcgtcagtctatacaaaagcaatggtttagagaaattttgaactttatacatggttttatttgttgcttcacggccgtaccttctggaaatccacggtaggagtgtcaatttgcgtttttgataatccttccaaggttcttctcgaagtagttgttctataattgcttcacagctaccatggaacatcccaagcacccatgggaaactaaccacgtgcttgtacgaagggacgacctcgggaggtcctagaaccagcatccatggacaagtctgctattgttcaccaacttatttctcgtgcggatcaacatgggaacgaagatgatagtcatagttggattgggattgcgtttaaggtctgctagatatactagtgcgtaatttccctagtaaagagctctaattacctcaagctactaacctgataacagtgaatgcccataggcgccaaggccagtctcccttttgcaaggtttctctccgctgacttcagcttgacaaatttccatatcttccaccttccaagccaaaacagaatggtacccagttgcgggactcgactgacaacaatcctacatgccgtcgacggcaagactgtcatctggaagataaatgtcgcaggcctcgactgttcgattattcgaaggcttcagggattgcattgagacatcaaattttctgcatcttcgcatgacagtggagatgacatcggaaggaaatggacctcagacaacctgggctttttcctattgtaccctagcttcactctaccgcgcagtcgctaggcacccggatgccagatcccagggtcaatcaccaaagtaccaatgtacagatcgacactagatctcagcaagtcaaagccagacccagcctcgccggcaaaagttgtcgtgtttgtatttcccggtaacgggattgggttgcataacgtagcatcggtgtttcttttaggaaagagtcttggatcggcgagaaaagcttacctacggctccggcttttcgccgaatgctcccctacagacaagacgggctacgtggacagtggcggagaggccgagatgttgttccctgtaggtttggccctagctccctcggagccgctcaccaacccacagcgttctagcattcccactccgccacggcggcttccagtctgacgaccaaacacatgtgaaagggcgttcgtgaccttccgaagtcctagtgacattgcagggaatatcggggccaaacaacatgactcgcttgctattggctcgaggagtttgaccagaagggcagttcttcgctgggaacgtttcggccgatgagcaagttttttcttggctgtttcctccgtgctacaccggcaaggcttagggttggctgagctactccttggttgtcaagggctggtaggaaattgccacggggaggcaaaaaaacggccggatgagtcgctggatgagttggattctccactggtctgcatccaatgccgtccaaagcatattcgtcgccttgcaagctccatatccagaattttggagggcgacaggccaatgagacatccttcttttcattttaatccttgtttggttgccttttctttccatctatgccgacagggtcggatacttcagacctggggactttttttgccgggagcttcgtggtcgtgatacgatctgtgctggcgggctgtagatccagggtgatcaaagtttgggatgacagggtggggaaactgccaatagtcatcccagtctcggcgcaaactcttgtcttcgctgacaaggaagtcgagacagggtgaaatgatctggttaatttcccacaaggcatctagccccattgcagtaggctaccagtactctggtctactctcactgaaagtaaccatcaatctcggaagaagtgatacacaggtaacccatcacagaaccttgtgtccagacgattaggaactgtggagccatagaggcctgaactgtttaatctccctgaccgaaaaggagaatttcataacggtatcattgccattgaatgtgcttcgatatggtattacctaggtaccatattgacatggtacaagatggtagagaattaggttgatccatggcccgatggatgtctcgggacgccctggaggattcgaccgttggtaaagtaaaactctaatctgtctcagttgacaaggcagaaaagctattgtctccggatatgaggactctttccttactgggtaatcattgtctaggaatatgtcctccgatatgcgagaagttgaactctagacccagtcgaccaggattgacgcattgaaggcatatggggtccattgggcgtgtcgcaccctaagatcctggagcaacaagcatatggggctgaggcagcaagacaagggggataacagtctagaatgacactcattgtcgaccaatgacctttcgaccttatttttttcgagtatcgaattttctgttgatctaaaaatcgtaaatacttcaataacacgattaggtcaggaatcccgactccgggatgtatattgctcttgaccgttgcctagtaggccgagcagtagcttttgcgccccctgtcgaaggatcgaacacccgaatgtaaccaacaatgaagggcatggcattgatttgccattgacgtgcagggaagaattgttgcacggggagatattttcgagatgccaaccttggaatgcacagactcgatggcacgtgcccgaaacagagacacctctaaggcagattggctgaaacagttgcaacgtcaaaatttcagatgtttccaagttgtagggttctggggctaatccttgtcgatagaatccatagatgggttcatgcatttccctgaaagtcaaattattattggcattggcttcgaggtacctgcagtgatccctggatgtatccacgtatcggacaatttctgactcgtttctcttccgtatctcatatagctcttcatatactggtattccttgagcaagtagaattaaaagttgatatatcgaaaagtgacatgtggttcacgggtagaggtagatttgatagtgtctaactatagtctctttcgggtgcattattagtacggaatgcatgataaatgatttgagatttaatttcagggccgcctaaccttcaaactttttgctttgagatgaatatagattgaagcatccatgtggagatatgagaccctataagcactgaagtatggtgtacataatatatccaccaatcgaatattctaggtggatgtacctggtacctcgtacctctccctaatacgcctacatacgtaaaatttcatgtatccatttcaccgccccccctgcacgtgtcaaaccccatgaccgtcacccgggaaggggtagaaccccgagagtcaaaaggaaagatatcattgtcaccctcctttaactgtgggattcaaagtttgtatcgttgatcggtactttcttaccctgatatggttaatcaaccctgcacctagtaccaatttcggtaccagcacggtcgttgtggccacacctgtggggaccgaatcgatgcacaacatacccgccataaccactgaagaaatcgaatcgactaccttgtcccagccaatcataagtctgcgggtgctttttcactgcaccttgccatctcacccagcctcctgcgggatggtcgatcttttagccactcatgcggttctgtcgacacgatcagaatgggtccactcagggagagggatcttttgaagctatggctccagtcctctgggtatttccttcgacggaagggtggaactagtgccgctcggttctggaaaaggctcccgggtacggaccgcaaccattgtattccccactgagctgctttagcctctgtggtggagattggaaactctccatctgcaattagggcacggtttcgcagaagaaaagtcgggcttaccaggacttatcttggtctctctgtctcggagtggagtagatctcgttggggatgcatcatcttaaacgtgttatttttattgctctcacgagtcagttctgtcggtgtgagcaccgccattatggacaatgcatcatgctaaatggaacttgtcgatcgcctgatcatccactttcttcatgcacgaaccgctgctggtgcctcgagcctcctacggcttaaaggacggagtactccgactgacgtttcaacaaaaacattacggaattcggttaagtctttctatccgattaggtgatttccgatatttaattcgcttttattttactgtcattggtccgtcgtctccaagtctgatacatcaaccacctctgtcatgggtccgcatggggtctgcataggtacatatcctgggggtcgatcatctcctctatcctttctagtttcatcttatttcgctctcctgcagtaacccgtctgccgggtattcgcactaggacatctgataccgggatttatcagtaatggaaaacacatacaacgtgtaagtaccgtgcctttacggtccgtgcagtcggcatcggggtccttctcgcgcgcaacatgggtcctgaccaatgccatacttcttaaaacgatcaaactgtctggggccggtgatgatccgatgctactctcctgattatggagatacgcacctggaccatttgcgcttgaccgggggcaaaattccaaattcagaactttgaaaatacaaatcattcagaaaagaaaaagaaaataaaagactttcctcgtttcttctcccccaccccaccacccaagagatcatgaacaggtaatgataatccggatatctttcgccgattatggttggacccctacgcaaacccgctgccacccattggagccttacccaatacaacgtatttcactgtccctggcagatcctaactcgtgggtaaggtcgcctctcggctagaccttactagagatccctgaagccttaccggggtagtggtaggctaatgaaactatcttgatgagtaggtaacaatcccgagaacggctttagatattatagaccggacttcatggaatattacctaggtaggtactagaagatatcaattgtaacctttctcttatttccgaagaacatccattgcatacgtacctaggtactactccgtacatccgatctcaatacctcagactttacccaactactcatttatctgagccgatatacttttctgcaacctgtcaaaagaaatcattccccaagatctggttctggtttgaccttgatcatcaaatgccaagttagagttgcagaattagaagcactcttcttttctgcaatacctgcaagatacttctgtccgggacaagagctttttatttgctcacactcccagggctgtcacaccagattacatcagttgtcttttcctttccccttctggttctgtattttttttttcttttttctgtttttattttagtcttttcttttttgttttgcccctccgttgaactgtgcctattattgcgattatattgtaattattaggatttttggtttttttggttgattcttctttggttaattcttttctttgccatcttctttcttaccccccccccccttcccccaatctcccattttagatctcgttttgcaaagaacatagattctggcccgatcgatttcctctttccctgtacttttgtacctatgacctaagttgatgggacatttcccaattaggaagtcatgtctataaatcagtgacgcactcctttggctcccggacattcatctacttcctcttgtcaacgtccaaaagacccttttacgcacaattctactgaggcatgcatatgtattgctcttcacgctcctctttataaccctacctttcctatcttcatttatacttcgctctttatcacttgtctactcccttcacccccaagctctattacttgccgtctccaaactacttcttaccgtgagaattgtccaagactacgagctgtattgggatcttttcctgtgatcctcaataggctcaaaaacacacagaggtatcaatcgagtactgtgagggaatttgactatgcagacttcttctcaaccttacctaacctttgctattctagacattcacttcttgccaccccagacctcaagcgccagacagatttggccggtgttacatcaattagccaaaagcttcagggtcctcgaggcacctggcatcagcacgctcaagatgaatccctgtaagcctcgcccttttttttcttctttcccattccctgttcgttctgtcatgcggttgattcgacattctttcctgcttatatctatttttccctttttcttttttcttttttcttttttttttttcctcccatatatcttccatgtctctaacctatgaatcccccagcactcctctcggaggtattctcattgaacgatcccgttacttcggagggtgactatatgaacgctcatgtgacagggtttgtaacggacgaagacgacagccagcgagtcggaggtctcgtctccatgcctgacaccaacggcgtgaggtaccacgcacagcagcctgtgatgcaggacttacagtaagttattttccattctttcaattcggacttgcccttgcgctccactcggtcagcctctcgacccccttgtcgctgcgcttcctccgggtccgggcagcttgaacttcagtccagcctgtttcggtaccttccataccaatctgctgcctgcatgtctttcttccgatgttttgtcctttttatctgagctcgtgccgtgccttgacgtcctggcctctctcgcccccgtttccattgtcttttacgcatcatggtttccgtgctgcgcccggactcatatgatatcttctggactgttttaattccaggcgatcgcacgtggatttatgagcttttactgagttccttactttagatactctggttcgagtgctcttgcaatgactcctccagactcttgtcccggtaagcctcctctcttatataactccccgagagaacttcctttgactgatgaattgtgtaaagactcattttcgcccacttctggtcccctcttccctcatatctctcggcttcagcatccctttgatagaatggcagactatcaacgggtgccagcactgtaagcttggctctactatgaaaaacggtggatgagactcaggactgatcttttgttcatctagtcaaccgccgactggaatgcctaccggtatgcagagttcagggcatagcttgaactccattcctgcgctcatgggacgcaataattcctacaattcatacgctttacagcgcggaatcggaaatatcggcttgcccttggggatgaacgatctttcccgtagccatggctatccaggcactcctcgcactttagatggcgggatggatcgatctcagaataatatgtatcagcaaccgatagtggagtcctcacagcgctcacagcctcaggttgaggctccgcctttcgacgacacgactgttcttcatacaattgttgcagagtgtggtggtcaatatcagacagtgaaaccagatgtccaagcgaaaatgggtcgaggcccctttccggctgagggcaagtggacttgctatcgccgcaactacttcgcagtgacttgcggctttggacttaatccttggcctccgactgcttctctatacatccgctatcctgaccagacccttgaaccaatccgtggattttcgatggcaatttctgccattgtgaatggtcaatatggagaaactcgagaactggtccaacataccccaaagcgagacaagcaatccgaacgcaaaccaggtcgtgtcgttcttcagcctgcacctccgccttcattcacagcaacatcaacggttaatggaaatctttcggggttcccccttggctcgcaatctatggactacagctcttcctacgcagggacacctcagccatgccaacccccaacatcccacgtattcgaacgaatccaattccagaaagcgaccgccaacaacggcaagcgccgcgcccagcaacaatattacaatctggtcgtcgagctgtacgctgaggttgctagctcagtcccaggtgaaaccgagtggatacagatcgcccgacgccactcccaccccctggtcgtccgcggacgttcccccggtcactacaaggacggacgccggggcagcacgggcagtatgggaccggatggggctggcggagacagctgcggtgtcattcctcacggactgggccaaacgggtcgttcacacatgctcatgtacgacacgtctcatcgaagtggactttcttacggcagaccggataaccggaaaatgaatgtcacagatcattccccgctcagcgacagtcctctgatctcctcttcctcttcttctggattccccgagtactcaatgattgacactatggaccccatggatacgatcaagtccgacctttacctcaaatcagacccctatcaggataatacctatacaggggttcccaaccaccaacaccgtcagtctagtactggtggatatgaccccgtttactcaacttatagccgttacgatcccatccagaatccgcatagtctatgcacttaggttgtggcttttgttttgtccctttatttgaattatttcttttcgtgttttatcctttttatctagctatgatcaaatgggaaagggtttatgcactggtgcagggcggcgtgcaggatcatgaggccatttctattcgctgttctatttttttatttttttgtcatctagttgctagtggactatgtggttctggtttatttcattgtgatctattatttatctttcttgatttgctttctccaattacttgagatattgtcccatttctattatctgtgtcttgctattgaaaaagaagcatacagaatgccattaaagactgtcttcagcaaatgacggaatgtccgatcgaataggaccgatttaattaagatctgaacttgactagataatagcatctcgataatgatactccgtagttgatttggcactattgtctgagtatatcataagccaaatatagtatgacaacctcatcgagaacaagatcttccagaaactaatcaaaacccctccaatccagacgtagcacctagtctagcactcaaactccccgatttgcccgcgttcgatagccaggaaccgttatttgctgcggtcctggtccaggacttgatgtcatcaattgcagggctactagtcccgttctcaatggctatggacttaagcggcctttgccttattttgcctttcttattttcttattttcttttgttttcctccatccaatcaaacatgaagcaaggaccggtaatttgcttccaggactcttttcgtgtctgatgactacatagacagatgcctttgtagtaagcagcatgggttgcccggctgcaggaatgattgggttgagttcattgaaagtacatgcaagattaaagggcataatgtggcgctattaatgatgtgttttacttatttcctttttttttttttgcttggggaggctcggtgaaatcaaacgaagcaaggttactgtttccatgtgtactcgcagattgagacggtaacatgcatgaagcaacagattagagccaattagagggtattgagcgtctgtttgtagggtttggaggttgagtttgggcgatattttgctttcttgctaggcagcagagatttctttacaagacatgggaagtaatataaatgatttgagatttgactttctaatattaatatgtatcttaagtgtaagaaatgtaaatgtaaagaaatgtaagaaatcggtagatgcagatcctgatcgacagtagtgcaggtgatgcttcattacaatgtacatcgatgtacatgtcagctcagccctgtttagctatgcgataaaatatgaaatttatattatttctctaagtatatcaaatgaaataaaccaggcttcagtgtgaccatttgacctctatgcttggtaaatagtaaatagtaaatagtaaaatgtataatccaatccctctaattaccctaattacctaggtaaatctgctcatgtgtcaagttaaattatttaagagatcctcgtatcgtccaagcctccctgcacctcggcatattccgatgttttaaacactctgatccttgtcaataccatcccctgtaaagggccggggtagtaaccttacatccgtatgcggtaagagatttgagagatatacggaggatcagaaaagcataggtttttattgttagaagactatttttgacttgaatctgaaacaatctccagtccggcttgtccttagttccgttggtatactatatgcttgccacaaggatccgtggatatatatatacatcttccgaaaagggaaataaataaatttgtattctcgacaagaaaacgctcagacagttggggtaggtccaatatcattggccgtttacctctaaccggttggataggtacttctgcacgtcgtacaagggaagtcaggcaaaaggacaatcggaggcgcttggggttttcttatttctgattcaacagcttgaatcgacacgccgaatttggtctttggtcatcgatgggcactttgacatactttactggggtattgccactctcatacttcattagtatttccgctgtatactaagtatatgttgcatgtggccctggtctacatagcactcccatgatttaactctcttttgctaagattgaacatattgacttaataaatgactttgcttcgttacccatgttattagagctcaacaaatggcgtgctaaagcttgaccgctatatttgctattgttgcggtcaagtagggtacattatcctgtgggctcctgctcctacgcagataatctacgatctacttagataccaaatacagaacatggtactcagattaatttgttctaagagacatgtttgatgagttcaaatcccggattatccttgcggcccctgccgctgcgccctcgacaactccctacgtctctagcctttccatggaattaacgtagtatctggaaaaacgtagatcaatgtgagatagatcgcaaacttacagtgcatacgaaccgtttccttgcatatctcctttagcaagcttcatttcaccgagtactaaagtctagaatgtactttggctttgatctcacttttcactctcagattttcctttcttgcaattctgtaaataatacacgttgccggggcctgcttagagtcccagatatctcaacgcgcgatgggccagtatagttgtagtaatgccctcaatgcagaaattactggctaccaagaatgccctaataaaccccgggaaatgcagtttatagctcaggcatgaataaccaggagactgtgatatagtagcaaggcacaagcctgaagtaatggaccctgggttgtcagtacgacgataatcaaccctatccgtcttcagccaagacgcccagaagacaatctgtgttcttaataattcgtattcagcccaatgaacccgagtaagatatctgtctctgttgcctaagaaacggagatggtgatatctctgcatgaacatctccgcgatctattactttgccagcgcactaggctgcataaccctgtccatgacatggctgctcaaatatcaaccatcgccgctgtcttggacgcattacgagctagcgagctagcttctatgtatatttggctctattctaatgcacctagcgctttttttccatattaagatatgcatcagcctaactgtctaccccggggccttgcaatattatcgaccatccagggaggatggtgtctatatccgtgttccacatcaacggtctccgaggtttgtcttacccggaatagataaaacgcacatgaccggtcaattgatctgtgcgaggtgatattttaaacaaataactctttcgggcaggtatatgaatgagatcatagcatctatgaatagaataatagtagaatctatccatcgagactgacatgacgaagagtcaatacctaggtaggtaggtatagatcaaatgactgattaccccaattgatgagcgtcgatctttgggatgcacaagatatctctcaaggaaaagggtcccttgtgctacactttcagtgatatcataaagctaagtttcaaaacgatacttttagagctggattactattgtatgcccatttgaggccttgttgctccaagaaggttatgatataaggtgtgttggtgagatttcccattacattggaagaatatgacttccctaatacgtcccattcaagattatgtggtataagcaatgcgtatcagggatcaattcaaatattcgagacgagtagaacagaagctaacctagacatacatattccaaataacccttagtctatgaccccatgatcaaagaatgcaaaagcaggacatcccaacatctcaaacaaaaaaaaccacagcaaagcccaatcccaaccagaccaactgcccatcgcatcactttcccaatcggacaaaatagaaaggtcggaaattaaaatcgacttctattggcccctcgctacaacaaccaacatgtcacgatccggaccaggctaagcaacgatccaccctctcggccgcagcaattcttccgagccacaggaatacccaaccaatgccccagacaggaaaaaaataaatgaataaacaaaaacgttcgcaagtaatgctaggcgggaaagatggccgctgactgcagcaggccagtactttcctgcgctgcgagcagggcggttggagccagggtcgttgcagccgcacggacaggcgtgggcatgagcgtgggcaaagagagggtaaagcaagaatgtcaggccattccctgtggtctttccgatggggacgtgcgcagatcaagactcagacatagaagccgggggcgtcagccactggccattgaccactgctttgtttgttgtttttgtcttggcgggacgcgcgaagacaagacaaacagaagtagtggcagggtggtggctatgacctctttctagtgtaggtacgtagtaagttgccttccggccccgacgaaccgggtcctcttttgaatcccggagtcccgatatgctgagaggattgatagacgggtgcggtatgtaggcaggcagttggatgtttggacatcgggcacgagcacggacacgggcgtagggaattgcagcaatgcagcgatgcagcaatcgcaatcgcaatattgcaattgagtttcttggggaggttgactcaacaagataatccagggaaagacttccttccataccagcccggtagtttgcaacggactgactccctctctctctcccttcctgaccagtcgcattcaagcccatggttccgtaagactgcatccatgactcccgtagataatcacagccgaccagacagcagaccccgtcgtccatccccatcaccagcgcatggattgatcacatgagctcccagagtcccgttctcgcgtcttgtctccgtcgactccccaattgctcagttcgcccggttatccgatgtcttctcttcttctcctccgacacgcgacacgcgcaccgccaacttccgatccagcgcatcctgctcttccttcgagggttgcatgcccaatgcgttttctacctgcggtgtggtccagagtccgatgcctgcccaggccatgacgccgataccgaacagggcccgggttttgggggtgaggccgcggtaggagctgtgaagcttgttagtttgtgactttctttctttccttggtcatggtccgggcgttgatgtatgcggggattggtcggttcagctgtgtgacatacctccagagagacatttggactgggaatgaaagtattctagtctttaggggaaataataatggggcaatgtgttacttggcttttggcatgctactttgatgagagagtcacgtgcaggtatctacactttcggtcacgggattgattggtacctgaggctagcaaactctatataactagttacttcgatttgtactagtgcgacgggttcgaacgagtgtctttttgtccgccgctaggtcctgtcaggtacctagacatccccgggtacttgtggattactagggggtggtgtaactgtggctgacaagtgatgtaccgaggtactttggacagaggcactgctacatgcatgtgtacttgtacttttgtgtatatgacaggtctgctgcaagtagatggctggattaagcagtccttaaaggcataatcgatcgttcgatgtgactacatgttcctaatactttttaccttttagagggacaccattctaagggccatcgaagaagattttctgtagaataaaatgaggctccagggctaaatacgtacattatgatagaaaatcaatctggccgatgcccaggagtacatgtccacattgattactatgtcgtttacatcgtggcggaaataaaaacatatcactaagagcaagactcggaaagagatgtaaacataaattggacagtgaaaataacagagagggtctcaaagcgcaggcaaatacagcagggaaaagaaagagaaaatgaaaatgaaaatgaaacgtgaaactaagaaatcaagaggagcagcttgacacgcttcttttacttcttgccgtaggccttggcgatttcggactcgtagcggttgaggatcttcttgcgctggagcttttgcgcagcggtcatgaaaccctaatgcctcgttagtaaagttcgagctccagatagcttgagaatcacttacgttttgcggagtccactcgtcgtcggatagcacaacaccgttaataatctcaatgccccgcaggccacctgcgcggccggcggcctgcagctgctgcaagacgattctgttgagcttctcgtcatgaacgagggactcgagggtgtcacccttgatgccgtgctcgtgggcaaccttcttcagtgccgcctcgacggggacgatgaccgcgacgggcttgtcttgatcctcggcagcgtagacacagatgttgccaaccaccggagacgagcggtaaacagactcgagcttctccagagcgatgtattcaccgttcagggtcttgaccaggttcttcttgcgatcaatgatgttaaggtggccgttgcgatcgaactcgccaatatcaccggtcatgaaccagccatcctcagtgattgcagccttggtctcctcctcattatcgtagtagcccgtggtcacacttccaccgcggatgaaaatctcaccccgagggggggtgttcgaggtcaggtatccagcatcggggaagtcaacgagcttgacctcgatggaggcgggaatctcacccagggcatcgggattccaagccaaggggtcgttcagggcacccatggcagaggtctcggttagaccgtagccgctaatcattggggcgatagccattgacaaaaatctctgggtgtccttggagactgggccaccaccgttcatgacgacgcggagtctgcctccggttgcctccttgagctttttgaagacaacggcgtccagaaccgaggcacccaggttcgagccagggaagccggtggacatgaggaaactcttggctgacatggcgccccagaacatacccttgaccaggaagcttgccttgtttaggttggccaagacacccttcttcactgactcccagacggccgggacaccgaccagaacggtaggcttgaactccttgatgtcgcccaggcagttccgcatagaggcgtcggacaatgttcgggggttaccgtatcccatggtaccaccccagaacaggcacaggttctcgaacatgaattccaaaatatgagattgaggaaggtaggtcaggagggaatccgtgtggttgatacaaggaccgatgacggcgtgaacaccagcagctattgcgatacattagcttaataaacagtggtaccggggtcctctctagcttactagcagctatcacgttggcgtgggtcaatggcacaccctttggtgggcctgttgtgcccgaggtgtacatgatgcagcacaggtcctccggcttggggggcacaggctccacggggttctcctcgccctgcttgcgcaaatcctcgatgctctgcacattgatgtggataaactcgctgtgtaactgatcaagaagctgctggtcgatttccgtgtcggtgttgtagataatatgcttgattgagggcacgctgcgaaggatgccgatgagcgactttagcaggctggggtcgaggaagatggcagtgctgccagtttgaacgatggagtgctttaggccttcctctcccagggtatcgtatgcggtcacaatagtcacggactgagacgcagcgcctgtaatagtaggttagtgagtttgttcaggcgtcgcgaaggaaaataagggtaaactaaccgtgtgacatagccagccagtgtgcgctataagacaattcagtcagtcatcctacctccaagctcttgggaggcgcagtgtgtctcttacctcgtcgctccgtagaggtggattctgccgcccttctcgaggcccagcttgcggagaccgctaccaagctcaagacagagcttctcatattcgaggaaggtcttgtaagtgtaaccactcatttcaaaataggtccacttcttgtcgacctcctgctcagcaccatccacgatcttcttgaccttcttgttctccacatgggtcttgattagtcggcgactgccgacagctttggagttaccaaagacttgagcggatcggcgcatattctcataggtggtagagacaccttcgagcgtcgtaatgaggccatccttggccttggggtgtcgacgggggattgtctcaccggggacgcgctcatatccgggcgcctcgaccgagaaggggcccttcttgaccatgcgcggttggatgtggacgttttgcactgacatattgactgtacggcttgctcaaggggaaaacggaaggagccggggtacggaggatactcgaaggaaaagatcctctactcgaggggggcggtggttagctagtgcgggaatagcgcggagctaagaaggggaaagacacaagagcgaagctagagcaaaagctagagcaaaagctagtaacgggagaactgaccaagtcagggaatagacgggagtattagtacgatctgagcattcactggggggaagaagaggagtaagttcgtggaaggttggagaggtggctcggcaaatgacgcaggaggtccaaggtccaaggtccaaggtttttcggatattcgagtactttgaactcgcaggtctttttttgctttttttctctttttgttatttaattggtttaatttatttcttgaatgcaagcatttaatacataatttgaacttgaataaatattagtaggcctgtgaagctagtatttaccttttgacgtcctatttaccctggagatcagttcccgttttccctttctgttgggaaacccaacaaattaagaagtcatagctttatacggggtatatgtatacggggaactatacaatatatacggagtactccgtacgtagaatcagaattagagtaaatagtataaatagtcattgtagatatattttctattttctattttctattctgtattctgtactccgtattctgttaccattcttatagttatatccctggtcccgtgatccctctaaaaactgtatccaaaatatcccaacccatagaatatccctaaacatccatggatatcaaatcatggaccaaatcgtcgacctactttcccaggaagaggtcatcgacgtggatgagggtacgccacccccgcgatatatcccaggtctagccacttactgaacttactatagagtcattcctcctcttcgcacaagacatcccaagcaacaacctggggatgctcaatcctcgtgcaccttcagtagagatctctatcaatggcaatgaatacacagtccatcaatcaccatcattactctcctcccatcgagcggggggaaccacaggcgccggtaagtacggagtacggactccggtacacatacgacaaaggagctcgcatgatctgcaccagttccttatgatttgtccccggaatccccagagacacaaacccaagcacggacacctccgcaggtcttttacccgagtccgaagtgcccagaccaggcccgagggtcgaggcgttgaatcgtcctatccgctgttttgtctgtgcctcggctctcggggtgaatgtctcatttgactgggaccctaacgctgtcacattatgctttttctcccccaacacgaggtcgaattgtcacctgccctgctatcccttggcttttcccttgttcatacctcgggataccttggcgacttcccgacttatccacaaaaacatcacccgctttcacgatcactgccctcaataacgatccatcccgaaattaaatatgtactaaccctgcaactagttctttggaaaattacccccctattcgcagaatggatcaccaatcccgcaaacccgctctggaccaacgccattctcagccagacctcgacagtagttgaactcggcaccgggatctctgcactagttgcgctcgcactggcgccctcggtgcgccactacatcgccacagaccaggaatacgtgcgcaagttgtttcggacgaatctcgacgccaatgcgtccgtctctgtctcttctagcaatggcaaagcaaaaggcaagagcaagggatccaaatcatccaaatcaaagccaagctcgaccgccaagtctgtcgataatatttccttcacaacgctggactgggagactgaccaggctgcctcactgaaggaatgcatggatccagacgaggctcatggccgagatggagaggaggaagaggaggaagataaaggcttcgacctgctcctttcttgtgactgcatctacaacgaagcactcgtggcgccgtttgtgcgcacctgcgccgagatctgtcgactgcggccggcgtatgtggctggttctgaggaacctcgctcgcaccgcaggccgactgtttgcattatcgcacagcagcagcggtcaccggatgtattcgagacttggcttagggaggcgatgcgggagtttcgggtttggaggttgagagacgatgtgctcggggagggactgaagagcgggtctggatatttggtacatttgttattgctgagggataaataggacacatctgtagatacaacataagtagatatgggtggcactgggcatatgtatcggggggatgtatgttgtctaggtactgtatatagctagctaacttagaggctcaagctccccctttacctaaatcatcaggtacatctatggagagagatctatggagaccttgaggtgcatggtggaatgtgagatgagattgctgagtagttgaagaagctaagccacggcctatgaagtttgacaacatcgtacagtgggatagcgagattgtttggaagaacatttaagagtgttttcagacttcttccagtaaggacgaatatctcgacatgatatctttgggagaccacgagtaccaagcatacagaccaccgacgaagcttgccggtgttattagcagcgtattagaggcctacattgtcatgacagctactacacgtatccttacccgaagagctcgccgggacagctaccacggcttcgaccctccgatttccagccgcaagcatggtcctataaccgtgagtcaagtacacaacgtctgctagttatagctgttcttcatcacttgatgtcggaatttgggcagatacttgatttatttgagcaatatgagttctaaaatggcaaggatgtcaccgatatcttgaaacaccttgacccatttcctgcattgacagcaaacagcctgaaacggtactttcggttatacaatcgcttggcggcacagtctcctggtttcgtattctaatagctgtggatctcgcaagttcatacgtgcaatagcagcaaaagtggattttgtctacctcaataagtgttacataaaagggacgtgtcttctgtggtagatacataagatgaattcaggtatgctcagtgtgcaactagccgtggaagcattatgtgatgacaactcgctcctaaattcaaatgggatgaaaccttggaagacaccaggaccacccaacgaaagggtatccataatacgtcgagacagcattctaggacccacatacagcaagagatataggagtaacctgatgcaattgattatcatatcgagagcgctggtatccgtagatgcccaagaaattatgtatgtgtatatatgtatagccggcgggaatcgacattgaaaataaacattactccgcaaggacagcatctaaggctccgcattttctttttcggccgcaggagagaattcatacttgcgcttcgacggcacagacgactcagttggtgtcggagatggaccctggacaccggattctgacggtggaagcgtcgccagcgcctctctgggttctgtttcgggcgtgcggtcgatgatagacgagatggactgcttggttgatccgttgactgcgtgcttgggtggtgttgccgcagcggaatcgataggagtgccctctgcatcgggcatgaaccgatctagaacttcggtcttgactcggtaggaaccctcgcgctccagctcaccctcggactccgagtccatgtcctcgtactgctggtcgccgtcatggtccagtggaattgagcccggcggacttccttctgctgagccccggtggttgttcatgactggtgggaggggagcgttcgggtcgtagactacaccgcagacttcgagggcgcgggactggctgcccagggtgcggtctttgtgtttcttggtgagatggcacatgaagccgtgcagagtgacgaagtccgatttcccgcagccgtgaatcgggcaggtgagatatactaggcttccgtctgagggccgtttccacaatgctcgcccagatgggtcatgggctgctggtcggccgtggcgttcgccccatgcctctacatttttgatggtgtatttttgcttgcggcggatggagccgctgtgtattgagtcatgggaaagcattgggtgttgatgatgagttggtgggggaggcgggggagcttgatggtgaggttgggcgtgcatatggggcggaggcattgaggggggtgcctgagatgaaggtggaaggggtgcttgacggggctcgggggggctctgctgcttgaagaaagccaatgttgttgctgcactggtctctgataatcggcgaggtggtgtgggccgtagaggcggcgagtcacccgcggcattgagccctaggcccatagactctctctttaacttcttgcgttgtcttcgaaggtcctgtgaagctgctgtttagaatccgaaatccttagatgggtatcaaaatccgccttacctcttcctctgcctcggctcgctccgtcattgctcgaaattcctcgtcttcatgcttgcgcattgccaaaatgcgactacgggttgcgttccgggccatttcctcgtgctctagatgccgcagtcgagcttcaatatgctccagtgaagctggactgtgtactggtgggactcctggtgggggatgatgttcatgcatgggcggcgcgaaatgacggaaatggtggctctgcaccatctgctccggaggtggcatttggtgtggaggcggattcggattcatggcaatgggatgatagcgaggaagatggttgacgagatggccgggtataccactgtctgggccagagtgatgcaccggtggtgcagttgtcattgttatggatggaggtgctagaggttatacagattagaaccctccaccgaaagctgaagagatgaagaagtcaaaaagggaaaagaagaagaaaaaagaaaacaggatgagacaaggatcgaaagggaagacccatctccgatctatgggtcgacggtttggaaaggattgacattcagaccttggagctaactatattctataataaaatataaaatattggaaaaataacaaaaaaaaagagtgataaaataataaaacaaaatataataatatatataaaataaaaataaaaatgtcaaatattataataatagaaaataagaaatgactcttccactagcgcgacccttctgcacccccgttatcttgaaaattcccgtaacggcgtaaggggatcgtctcaggggatctcgattgtgattgatcgtagagcatatcgagtagtatattattgaacaagatattgggtatttaataaataacatatactagtatgaatatactccgtataatgtaaaatgtataatgtagtaaaaatataaatacaatacctaaagagaatgttttttaatttcccagtgtggtcgatggagccccaaacctgaaaatgacacactcatccatggaattggcacgacgctagcatgtaaacaaatcacaatctgagccctaaagttcatttcctttggatcagaatggagtcttaatctaccggaccaatgatcggcatctgcaaattaacaaaattgacttaaaaagtcacttgacatccttcaggggctctgaacttgacgagtctaaaaattctgactgcagtcacccccatgagcgtcattggtccaaacagatagactataatttcaaagtaatatataagtaatataagtaccttggtaatgaggaaggaattccagtttcaataatctttcccaatagttttagatcccttttcccttttccccggagaaagtaggagtcacttaccctattatagtatattaatcaaggttcatgtatgtatctcttggccctaaaagaaagctaaactcgatagtcaaaagcctcgaatcagagcctccgcgattgaattttttttctcatcacttaattccgggatgaaccgtccaataataagcaacagatctaccccccattccttgccaagggttgtgctcatccttggagatcattatgtaaaggggaaggaacttgttcctgagaagttccatggtagccatactccgtagaagcgggaagaattacaatggatcttgcgatacttctagtcatgtccatgtactccgtactccgtactccgttcttggtatcattcttgtccggtacattgctctccacatattattgtctggtggcatcaagctatttgatttgttatgtatctccttgtaaccttggaactagacctaccccagtcctatcccggctggtccctttatattgtacacaatcatgaacaataacaaatacattatacaacatagctatgtaatatttttcaagggactagaaatcaaggaaatcaaggaaagatcaatccacaaatctacctaggtagtgtccccgaaccatacataagccagaatatgggtcttgtatgggttttctgctcaaatgacttggacgtattttctccatgactatgggtctgcaaacgccagggcttagcctgtaaagcaaagacaaaaaagggaaacaagagtcctcaaacaaggaaaaggaaaaaaaaaaaatgccctgtcaacagagtggggaaatgaaaataatcgtacgtactaggggcacgctaacgcagatggtctcacacaagaagtgatcgacgaatggtcgagggggcagttatgtgggcattggaaaattttctacttgcaccgggatttactttaaagagccgtcttacattcagatgttggtatacaagatctaatatatcttacagtattgatagtggcagctaactttacaattatagaacaatagtaggtcggataccatattatatcagtcatcttactcccctgtctatttcaaatgtcctgcattccaccccccacaaagcctcgtataaaatccattagaaataattattatctacacacatcgttggaaatgacccaccatggcagcccaactggtgtgtacaacgatgatttgctgctcgaccgcaccgctgcagggaagcctgcacgattgcttcgctccgtcaccacgcgagcccagattggtctgatggcaggacattgcttttctcgtgtggtcttaatgtagcccaaatcttgtttctccttcgttcatatggaaatgcatatcaagggcaattgtcttaaggttaagcatgcattgttaaagttaaggggaacacaagggatacaatagaagcttgcagaaacctaccttttacctctctcgatgtatcattgtacctagctagtgctactccgtcatacccccctctcataccttcctccactctatattgtagctcctctcgaccgagtcccatcattcactagtaagagtaaactagccttgatcctctgtggataatgcaaggatgacgagactatactccgtagagacgattggtctaaccaaacgggctgcagttcaaaccttgtacgatggtagcaaagtggagatgcagacgccagaattaaattaatagattggtgcgattgaaagccatgcagtttcgggtgactggctcaacgtgtgctctgatgggactaagggtcaaaacccgtgcgccattggagcttctagcctatcatcgttgtcatcggtcctgatatttgactttgttgtggtggacatgatgttgagagtccagtaatatggttattattaaacgcgttaaaatgtattccggaagataatagccactgctaccactatatcaatgtagatcgtaatcatggtcagcttggccgctattgctttgattgttttcgatgtcgctggcgatatatcactggttatacatccattactccacagaaaatatgcctatacgtttcaggctttttaccgccattttcatgcctttctagctgtaacacggagaaggtggaaagacatctaaaaaacgcatcgtgcggagtagtgttaccttagatataacgtcccttgtgtcagccttagacaaatgaatcggaatcatggtcctatttcctcaaggacagcggccacggccaacttttattgtagctactatggttgctaataatatatatgttatcatgccatatgcagagtgaaaaagcgtatcatattgcagcgcgattcggactgtgttttgttttctatgattcggaagactggattggctggtatcaagtaaccccatgtgcgtacatatatgtactccgtatgtgaagttggaagtgacagaccggaaacaactatgtctgcaaccgtgaggcagcaactgttccaagtgcctgtcactggcagataggtgaaagctacatacgtacacatgcacgttgataacgttgatactagatcctacagttgggagttggaagacaataattgtgaagcgagaggagaattgtccgatttctattgtcacatgcccatgaaaaccaaagcctaccacaaccttttttgtggcccccctgccgtaatgtcattagatacaattgtagacaatcccggaatgaccacttccaggcgacgaacctgaacagtgacacgagggcagaaaaaaaaaagaaaaatttagaatcatacatgggtgtggtagtggaacaccgatacaccggaaaacacgaaggggtaaaaagggccttgaaagtatgtgtacaggtaaatgcgagaaaaggagatgcaaaaatcagggagtctctggatacaaaggaaaaatcaaaacacatagaaaaatacaggaaccattcacggttcaggcgtggcagttacagagcgaaaagcgtttactgcttgttctcaccctgctgctcaccaccctgctgctgctgttgctgctgctgctcgctgttggccttgtgcatcttgtcgaagagggtcaagctggcagtctggaggtcgtcgaccttctccttgagctcctcagcagtggtggtgctctcgccggactggctcttgacgacgaactcacggagagtagcgatcttctccttgatggtctcagcctcggccttgtcaagacggtcctcgaagtccttgagggccttctcagtgtcgttcaggacgctgtcggcgcggttggcggcctcaatggcggccttgcgctccttatcagcctcagcgtacttctcggagtcctcaaccatggactggatctcggcatcggaaagaccggaaccggaggcaatagtgatggactggtccttgttggtggacttgtccttggcgttgacgtggacgatggagtcagcatcaatgtcgaaggtgacctcgatctgagggacaccgcggtgagcggggggaatgccaacaagctggaagttgcccagcatcttgttgtcacggacgagctcacgctcaccctggtagaccttgatctcgacagcggtctgcatgtcagcagcggtggagaaggtctgggacttcttggtggggatggtggtgttgcggttgatcagacgggtgaagacaccgccgagggtctcgataccgagggaaagaggagtgacatcgagcaggaggacgtcagtgacctcaccagcgaggacggcaccctgaatagcggcaccgatggcaacagcctcgtcggggttgacggacttggagggctcacggccgaaggtggacttgacggactcagtgaccttgggcatacgggtcataccaccgaccaggataatatcctgaatgtcgcgagactggaggttggcatccttcagggccttgcggacgggctcagtggtgcggctgataaggggctcaaccagagcctcgagctgagaacgagtcatcttctgggtgatgtgcaaagctccgctggcgccggcagtgatgaagggaagactgatctcagtctggagggaagaggacagctcgatcttggccttctcggcggcctcacggatacgctggacggccatacggtcgccggtaaggtcgacaccggtctccttcttgaactcgttgatgatgttgcggacgaggtgaatgtcgaagtcctcaccaccaaggtgggtgtcaccgttggtggacttgacctcgaagacacccttctggatctcaaggacggagatatcgaaggtaccaccaccgagatcgtagacggcgacgacacggtcagcctccttctccataccgtaggcaagagcagcagcggtaggctcgttcacgacacggagaacgttcaggccggcaatctgaccagcatccttggtagcctgacgctgagagtcgttgaagtaggcgggcacagtaacaacagcgttcttaacgggcttgctgaggtaggcctcggcggtctccttcatcttgttgaggacgaagccaccaacctgggaaggggagtacttctggccacgggcctcaacccaggcgtcgccgttggtgtgctggacgatcttgtaggggacctccttaatgtcacgctggacctcagcatcggtgtacttgcgaccgatcagacgcttggtagcgaacagagtgttctcggggttgacaacggcctgacgcttagcggcaataccgaccaagcgctcgccatcctgggcgaaaccaacaacggagggagtagtgcgagcacctattgaaaaattgagttaatttccaatttcacttgagcccatcagaaggtgggtgaaagtttcctgtagtcgagctccaaagctctgaccacctgtccacaggagataaaattttcttctcacgtaccttcggcgttctcaatgatcttaggggtcttgccctccataacagcgacggcagagttagtggtacctataacgaacaatgttagaatactgtcgtcatccaaagttgatgttcacatcgcgccaggacttaccaagatcaataccgatgacctggcccttgaccttctcctcaccaccctctgtggagttccatctccggaatgaggcagggagtctggaggcaggagtgcgagcgaaagcagcgcgcgggagctgtgaaagaatgagtcagtgacctgtgacgcgttggaagtttttcatccttaggtaaaagggaaagcttactccgcgagtaattgtgcgaggaagcattgtgataaaattaattaataaaaagagaaaaagagaaactccaacgactcaatcgtgaagtattaaaaggacagaagaagggattgaagagatggagatggagagatggaatcgaaaagaaggggaaaaggaaatagaaattgcacggagagcttcggcccgtcgaacttggtagaatcacgggatctgaccaatcaggaagggagttgccgtcgacagcctcctaggtaaccgagctcaccgccttgtgccggatatgcgtgtatacaatgggagattcagatatcttgggatatatattcagagagtagactgcagagcatataaggagcatgtagagttcacatagtctcagtcagtaatccgcttgactacccccaatatccctatgttgtatctcaagtggcagtttaatggcatatcattccgctgtggcaaagattgaaaagctccgaactactcccgaggtctatactatatagtatgcgaagcgggtcttctatcaatgcaaacaccatgcaaagtggctgtcgcaataagcatttctggctcataacacttgcgacaattgtgtatctccagtgggtgaaccagtcatactttgaacatgcccaggtgtcgtgtgacctggtcggcaaaccctccccttcgttgatttggctgaacctgagacaagattgaaattagagctagaagtccgtctagatctagatggttaatgacaattcatgtattttggggaaaacaatgcccggtccagatcgttgggactagaagggacttaggtggcaacatggcgaatattactatcgagtatatacctaggatcttcaaggatattcacgggtaaatgtaagaaccaaatacaaaccatataaacagtgtagtgcatcatcatgaatgaccaaagccggttccgggggtaacagtcgaaccgcattcgttggaatttgcagttccccggctttttgtcccagtccaaagtcttacgtcatccaaagcacctggggcagttggacattgaacactgcagagcacagattcaaaaggaaatttgttcaagaagaaaccggaaaggaaaacaaaaggtgtcccgctgcctaaacagctatcaagttcaccatactccaacggggaccccccgtttctcttgtcttcagaacttccccgctcgaacaatgtcatctctggcttagctctatccaccatgacctcggattccactctgctgtgagagcccttcccgggtgcatcctactatcggaacaaaactaacgtgtcttagacatcgcccaaccgaggctcttatcctcccgaccaagcgacgcttcttcccgttcaagatccccaacttgttcgttgatcaacccgcttatctcccacccgcaatctaacttacgagagctttggtttagtcacacacagcttcgcaactacattagtactgctgatcccgatcgcatttatgtcgtcgtcgagagaatcgtgtattcaatacacatatcggggcaaaagcgcgagagtgtggcggtgatcccgtttgaaccgcgctgtctggtcgctgggcatggttggatagtagtggggggcccggaaaatggcgaatgtgctttcattcgcatcggtgatcgcggaatgcaggtccatggagatgcgcccttccaggatgtagatagtgcgctccctcttgatctcgacccaccgttaagcatgacttcgggcgacttcaatagcgagtccgcatcaacccgatatcgaagcatcagatcatccccggaagtcgagcttcacaggtttggtgggagtattgtcaattcagtgacaatccatcgtttctatggtggcagcgaggactttgcggatgaagatgtcgtggttctgaggtgggcgctggtcggaaaatgggattgtgctgatcgtgctaactcatatgaatagcaataatgatcggacagtcacggtgtactcactggctcgcgcgaaagtcttgaaggtccttcatcatccgacttgtatgaactatgcgacgatttccccggactccaaactgctcacggcagtaggagatgagaaccacgcctacttttatgaaatcactcgtgatctggaatcgtctgggacaactgaatctggagagaagctcacaggatgggaatgggagcttatcaatcgcctggagatggacattggcctgcgggcggatgatgcgtgttgcttcactgttgctttctcgccatctagtcgcttgtgcgccatcggatcccaatctggaatcatcacgatcatcgacgtcaagtccatctacgagcacttgggcggctccgaagacgactcccctatcatttgtcaattcccggcatcaagatcatgcgccgagggcggtgccgttcgttgtatggccttttcgcccgagccatgggaccttcttgtatggctggagggtcacggcagggccggcgtggccgacgtccggcaacattttatgcgcaggcaaatcctccatttaaactccgacgatccagaattgcaggaagtgtacacggacttttcgatagagaacctcgaacgacacccgctcggagatgatcttccggagacgccaccacgagtaagactcgacaacgaagactttccgatggaacggaacggagagcaaacggagcgttcgtccctgcgagagtctctgattcaagatcttaccgaaagagaaaggttgattatggagtttttgaacacggcacggtggacgtcgcgactggaagaagggcttactgaacgaccagagcgcccggctagggcaaaccttcatcaacctcaaccagtggctcggccacaaaatcacggttctccagatggtaccactcgcactcatcgtcctacttcgcccctgcgtcgctatgatccttctgatgtctcccgagatagccatctgggccgcactttatccaacccaagacgccggaactcagtggtggtatctcaaggcagtcggccttcggaagcgacgtcctcacaccacgatcggcaacctggcatcaccctgagctattccacctcacattcagagcttacacccatcaggtcagaaattatatctcggagcggtgccgatcctgaagcggccaataacgaaactagcatcccaactgaagcgactggagtttctaatccaagtctagacatgcatggattgagccaccggtcacagcgatcaagctccattccccggcgtattgaacgaccacaaaccggaacagaaaggaggcatgatacgccacgcctcaccacctatgagattcgtgctaatgtcgctgctgagcggcttcggcgtcagcgccagattgccaacgaggtacataaccgctcctttgaaagggaacaacggcatcgccaacagcttctcgggtttgagcagacacactctccccgctggatcagaaacataatcaatgacctccctgatcgaaatccaataaatggctgcggcgccgaggagccagattctactgctggagttggttggggcgccgatggccgttcattgtgagtgtataatgtggcaagtttgcggaatcaaactaacttttgcaggtacgtcgccacactggaagggatctttgagttcccactgaacattcacgatcggaaaacattccctatcttctcgtgccgttaaattcctgtgcctggcgttacagggcattctttatctaaccttatcgggcctcgattactttcttatttacttctctattcttttcttcgtcattttctttttgcttctgaccattccgattctacggagatccaacatatctctggatagcgaatctacaactacacaaggatggtctgcagtcctcactttgccaaaatggggactcgttgcccttccttgttagacttgttattgtcctgctaacaaagtcaatcccttgctcatgccgaatcgttctcacgctacatacccttctggcgcttaggggcgtacatcatttttatctccatcctatttatcttttcaatgctgcatccacaaatttttgtatgactgattgaagtacaaaaagtgaacattacatatttattttctgccaatacaatcttgtcataaaagagtaaattaaaaaacaaacaacgaaaaataacttgaatatgtcgttttcgtagcacgccgcattcgatataatgctagcatttatctcgcttagaagtagatatataacaacgcgagatgttagtagtctacagccagattcattgtcgagatgggagaagtcgcatcgcacttatgattctgacttattgctatggcttgaggatatatgtgtcattgatgcacatcgtaacgaacataaattgtactgtaccagaagaccatggacaatgactaagaatgacttagatgacactgtgacactgttttactatgacacgaatatgctggttggcattcttgtgctagctttccctgaacccggcctcgcaggaccgcttcgtggcagattttggcatgattcaaaagatctgctaagtgaaccgggtgtcttgtatctcgcaatccggtccttaagtgggaggttagggttccccgggcacataaagcagattgtgggtcgttcccgatccttgacccgaacggactccatcgcttggcgcaggtcgatctcggtgtcatacgacacgggccgttgccgattggcaggagatccgggatcatcaacatcgtcaacatcgtcaacatcgtcaggtacaggcaggcggcaaggtcgagtgggtcgaggcgcggtcgcccttcttccacgggcagaatgcagtcatcgcatttatcgcgttaatccgacctggcctagatgcatacatgttgtcagataaggtcaacgttccgtctcaagtcccgagggtctaatgattattctgcgaacaagtttgtgggacttcgtatcctacaacgaatagaggtttacatgttcgtatttggaaagctgtagcgctaggttctatcgccaggggccattttaaagacaaagtgatgggtttgaactacatactgtgcaaatatcgactacacacacacgcacgtagcctactaaagatcggatgcctgctagatagatctacttggggccttctagtctctcgacgatgcttgattagattattgctcagatgctagctacgggaacacaaagattcaggtatgcggcggagcagtcggatcgcgtgcagacccagatttctctatcagatgtcgacctatttaaatagcatatcccctccttttttaccctgtacattaagcactattcctcccacttctcttttcccctaacatcgaggggacattctagctagaaaaaaaccaaggtgcgggttacaccacccgagacaaggggttcgctggctgagcagctagctccaaaactaacagtcagggggtaggtctttccgtcatcccatttaacattgccgacctgatcgccaacattggtcgagtcatagctaccgtcgttgttcatgattatagtgaaggctggatgtccatcctgggctggccactcgcgagattcgccacgtttcaatgggccgccatcgttatcggcagaattgttgatcgcgtcgcatgagtcgtcatcattggtgacaatgatcaattgagtggtccagcaatcagcagctgcgccttggcagcctgtttcgtttgtttcactgacatagtatttgaatgcatggaccgctggagtggcaagcagtgccatgaaaccgagcttcgagatgttggatagcattgtcaagattgatgacgtggaatgatgcccaaggacttgagtgacgagtggatgaatggatagatggcagaggaaaaaagttttgctcaccatatatagtaaactctgaccactacagctcgtgctgcgctgttcgttatggttaaccgtcaaggtaatccgaatgaccatcaaggtactccggttgcccgtcaaggcactaggatcgtcgaggtgctccagttgaccccggtaagtttcacttccgagagctaacaacccacatgagccttggtcggatgttaatctccgccgttctagatttccagttaggccagccctacaggagcctgtgagtcgaatgattcttggcggctcggagatagatgtacgttatggattgtccgagccttaacaatccatgagtaatgtccaatgtcagagaacaggtctgggatattatcaattacgaggcatattggcattttgagacaagcatgcggcagatacctttcagaacggcgatcaaagcccatctttcatgcgcgagttctgacgttggcgtccggaagtagcccgaaggaatggactcgaggagggccccggcggaccgcgtggcatttcgcacagctaaatgttccctgtttattcgtattcacttgattaattgatttttcataattccatgatggccgagacaccaatacgagaactcatatggagattgcgatcgtcgaccctgtaagccttccgtcatcatcgaaaagggttctatacggcacgaacctaatctagacaagccccgacaagccgcgacaagccctgacaagccctgacaagctcaaacgccacggactcccaaggtcccccgatgcaaccaagacgtcttggcaaaacatccctagtggactacgagtcacccgtctctcggcaggttactcgctggcgctcaaggtcctaatgatcggaccattagcagcatcagaggcgaaacaaaagctatggcgaatgccccgacgctaactaacctcagccgcaataggcgagacaaaatcgaaaaacggaaaaggctgctgggaacctcgaggaaagccaagactctcatcggctttctccgtccttgaaggtaacaaacgccatattcttgtataaaatgatgggacaaagctcttgattatcctgatagattctattcagttctaccaacacatatcaagactcaacattccgcccgagcaaggtgtggctgtctcggattcgagtatggctcccatcagcgaaaagagagaggccgatgtccaagccacatctggcagtgaaccttcccatgatccttatgtggtagacatgcgcaacaccgatgacacaacgtatttctacaacacgaataaggacaaggttgggcctttgactccagaggctgagggaagactagtccgcaagaacttctggtgtctcctaagccaaacatggtggatctccttccttattcaccttgacaagtcgacactgtctcaggctagcactatgggccttttcgaagatgttcatatgtcgaaagagaaaaacgagtttaatcatctatttgtcctattctatgcaggatatcttgtcgcgctttggccgggtgcttggatatcgcaacgtgttggacacaagtactttattaccgggtcgttgttcctctgggccctgttacttggaatacatcctgcggtcaagaccggtaaacagatgatggctgtgcgatttctactgggaatggttagtataccctaatgaactttgattcataatgtgctaatctttccagaccgagtctcaaattgttccctcaaccgccgtccttcatcaagcgtttttccctccgaagaagagtccatgggtgcagcttctatggtgggcatttggaagcatggcaaatgtgatgttaacaatgattgcctataaactcatcgttgatgacaagtcgggagttctagctgggggtattcactcatggaaatggcttcatatcatctgtgctcttttgaccttcgccatctttattcctctgctgatatttttgcccaactcgccacttgatgctaaatggctttccactgaggagaaggtgcatacgatccaacttattcgcgagacccacgctggaatctcaaactcaacgttcaagtggtcgcaggtgcgggagtcttttactgaccttaagagttggctgttcatgtgtgacatgtcccgttcatctgtctgccatattcactactaatgttcttctcagcttccacatgttcttcaacgagctccctaacaacacatcccaacagctcccgcttattgtcgttggttttggcttcaccccagcggagagtgctttgttcaatattatcaagccaatttggggattcattttgattattggatccgccaccttgctttacagtacacgtctcggtacaggatacacatgtgctatatcctatgttccttgctttattggcggcatcattgaggtaagcggatgtattttccacatttctggtctgtcttgttaattcttgctcagctggcatctccatggtcaaacaaggtggccctggtagttggaacccaaatatctacattcaaaccatcttaccttctcggtctcagttgggcgggaacgacaacaactggatacacaaagaagctctgtctaatgtcttcttgtattgtggctgcttctgttgcaaacatgatatcccctgagttagtctaatctaaagatgccaactaaggaatacagcgctgacatgtgatatagattctggcaatcgaaatacaaacctcgttacgtcttaccctgggccttcatgactgcgttctggctgatctcgcccatgatgtgcattatcattcggttttacctacagcgagagaacaaacgtcgagagaggctcctcactgaaactgacacggattctgagaaagatgaagttattgacgctggcggccagattgtccacatcggtgatcgtgatcttgacaagactgatcgggaaaacctgaagtttatgtatcctctgtgaccttttaccttgttctcccaaaatgccagagtttagaagctgttacaccgatatattgcagacagtgtaatatgaagcaattcactgatggtggaaatagagggaaataggcactgcgagtgcggaaggggggagaaatagtatcaatttcacctccaatttcataggtttttttcttgattttttcagcgtgtttaaagtattgatctagtgtatcaatgcagcctcttactcggcatttagagctttgttggcgctagggtggccagctttggttttgcgaccgttgattctacccaggtatagtagagatagtagagagcgtcttcgtacagaaagattgtccgggatatcatttatccggggatcggatgatctttcagggcatcgacgtcatgtatactgtcagagtataccgccttcagtgtctctcggtgaagttcacaaagtaaactgtcgctgcgggctttgatctgcctggaataactccgaaacacttcatcagactcaaccacagagtcaattccactcgttttaccttcttattttaacgcccagaaataattctcttaggtttcagccaaaggctgtaatcgatactgtggggttcggctactgccgagttaaacatcgacataatttcactcgccggttgactcttcaacatatttttccacatcatggcgaacttggtcgatcccccaatggagaagttaaccctagaaggcaataccttcgactcagcggcctttgatgctcgtctcgcggacgaagaggatggcaagatcgagaacttccaagctcggaagcaagctcctcagagtgcccaagagttgctgaccgagcttgaaaatgagttcctgaccccgtcagaccaattcagcactaaatggttgaacaccctgcaaaggtatgtatcttatttccaattgcggggcagcttttaacagctttggcagacgatgggacgtttcgacagattacgcagaccttttcgaactcgccccgacacaatcacggacggtgactcggttcacacgagagggactggaaggacgcgttactgggtatcatgaagtgacagttcctgctgcaagcgcaacagccaagaattccacctcgcttctccgccgacctgctggccgtgccgagtttgtcagaggtgccgcaggtttctttccatttgctcccggaggcttggacgctatcgagtccgtggcagatatggaggccgaggctcaactcacagagcaagcgagcaccggaaaacaatctggtctcgatcgcattatcaactttggcaccgagggaggtcttctgacaacaccccctggcttcgataacggtatcaatttcgatgaagccaaatccaaagccgccaccgaaagtgcccaagaagtcgaaactgcccttctccaagaggaaagcgacctgaaagtggatcaacctgaggaaactgccgatatcgatacaggagcacagccggagcttgatgacctcagcgacgaggaagatgaagaagacattgacgatttgttaccggtcgagtttccggcattggaaccacgtacccagttgctcgcaggcgcccacaagcaaaagggtaaagaatgggcccacgttgtggacgtcaacaaggatattccaaatttcaatgagttggtcccagagatggccagggagtatccatttgagctcgacactttccagaaagaggccgtttaccaccttgagaatggcgattcggtgtttgttgcggcccatacctcggccggcaagacagttgtggctgaatatgcaatcgcgttggctgctaaacacatgacgaaggcgatctatacgtctcccatcaaagcgctgagcaaccagaaataccgtgatttcagagccgaattcgacgatgtcggtattctgactggcgatgttcaaatcaacccggaagccagctgcctcatcatgaccactgagatcttgcgaagtatgctgtaccgaggcgctgatctcatccgggacgttgaattcgtcattttcgacgaggtgcattatgtgaacgaccaggaacgaggtgtggtatgggaagaagttatcatcatgcttccggagcatgtcacgttgatccttctctccgccactgtgcccaatacccgcgagtttgcatcctgggtgggccgtacaaagaagaaggacatttatgtgatttcaacccataagcgacctgttccgctggagcactacctttgggccgggaagagcaagcacaagatcgtcgactccaacaaaagattcctcgagaccggctggaaggcagcggatgatattttgtctggtagagataagctcaaagctatgaaggaggctgaagctcaggcacagtcggcgcaagctagagcaccagccccccagggtcggggacgtggccagccaccgaacgtcagaggtggtcgcggcgccccacagcgtggaggcccacaacgtggaggtccgcaacgaggtcgtggacagagcggcggacagtatgccaaccgaggcacaggcaacattgctcgcacagggcgtggcggtggccgtaccagtgcggcccaggacaaaaacacctgggtgcatcttgtttcgcaccttcgcaaagaagatttgctgccgggatgtgtcttcgttttctctaagaagcgatgcgaggagaacgcggattcactgtcaagccaagacttcagcaatagtaccgagaagagtttgacgcacatgttcattgagaaggcactcacccgattgaagcctgaggaccgcacgctgccgcaaattcttcgccttcgggagctactaagcagaggcattgctgtgcaccatggcggtctcctgcccatagtgaaggaagttgttgagattctcttcgctaagtctctggtcaaggtcctgttcgccacggaaaccttcgcgatgggcttgaatcttcccacccgaactgtggtattctccgggttccgtaagcacgacggcaaagcattccgtgatctgctgcccggtgagtatacgcaaatggcggggcgtgctggtcgtagaggtcttgacaacgtggggtatgttattgtgacaagcagcggaagagacgaggcgccatctgctgcgtcgctgaagcagatgattcttggagaaccgacaaagctcaggtctcaattccgacttacataccatatgatactgaatttgttgcgtgtggaagccctgaagattgaagaaatgatcaaacggagtttcagtgaaaacgcaacgcaagctctcttaccggaacaggagaagcaagtccaggtatctgaggcgagtcttgcgaaaatcaaacgggcaccatgtgaaatctgtgacctggatttggttgcctgccatgacgccgccatggagtatcgaaagctcacgtctcaattctatgctgaactgctatcatcgcctgtcggcaaacgtcttttcggagtaaagaggttggttgtgtaccgcaaggtgagtgaccattgttacgttgcccatgcgtagttacgtgtttggtgaaatgctgacgtgaaagataggacggactacgtaccgctggtgttattacgcgcgatggggtttccgcgggggtcgttggggctgtaccctgcattcaagtgcttgagatcggaacgttgagtagcaagcggcaccccaccgacatccttccattcttgcctttgttccgaccatacttccaaccactccccaatcgcgtcgagaagatgagccttcgcatatgcaagatccgtctatctgatgtcgagtgcctgacaaacaccctggttaagatgaccaaaccgatatggtatctgaacattaagaaaggtacgagacttatttttgcacatacagttgtcaagaaacactaattcgggaacagaggctgtccagtgggctgaaaaggaactgcctcagtacactaactcttggatcaatgcggcctgggaggaaatcgattggcaacgtatcaaagagatggaaatccgcgatatcctcgacaaacgacaagctcaggcagagatttcccagtcatgcacctgtctacaatgccctaatttcgcggaccacgtgagtatcctacatctttcggtctaaatcatggactaatttctgatagttcgagatgcaacacgacgagtggcaagttaaagaaagcatctcggagctgaagcaactgatgtccgaccaaaaccttcaactacttccggattatgagcagcgcattctcgtgctgaaggagctcggctttgttgacgaacaatctcgtgtgcaactgaagggcaaggtggcatgcgagatccactccgccgacgagctggtattgaccgaattggttctcgagaacgttcttgctgagttcgaaccggaggagattgttgcactcctctccgcattcgtgttccaggagaagacagagagcacccctaccctcactcctcgtctggagaagggccagaaggagatcattcgtattgccgagagagtgaatgatttccagatcctgcaccaagtcattcagtctagtgaagatgccaacgacttcgctagcaagccacgctttggtcttgccgaggttgtttatgagtgggccaagggaatgtctttcaatcgcatcacagacctcacggatgtgatggagggtactattgttcgggtgatcacccgacttgacgagacttgtcgcgaagtgaagaatgcggccaaattggtcggcgacccgaacctttacactaagatgcagcaagctcaggagttgatcaagcgcgatgtcatattcgcggcctcgctttacatgtgaagacatccaatccttgggacgtatatgggttatgcctgtgcccctattgggtagtcatgaattcttttctggattcatcacaatgtacttaatcgagacgaagaaatgaacatgaaatgaactactcaaaaataccagcatactttagaatactttatagaaagcaattaaatcaaccccaagtgttactacctatatacaacatacctaggtaggtagtagcccatagttcatataagaaaatccgtgtgtgcggcctctgattagctgcggggcgaccgcctcccgagagtcgggaaaatcgaaaaaaatccccctcctcttgaagaacaacatcttctctctccccttctcttcaagatccatacgatctctttaggacattcacgtcctttcaatccttgactctttccccttgcccgtctttcatcggcgccggtccgcgtctcccctcggggctctcaatttatttggagattttttgactttctggtgttgggggattgttgcgcgatggatgttgcagccctccgagatcgcattcagtctactctagacgcgaatgcggatattcgccggcaggcggagcttgatttgaaatatgtatgtgctagatcgactggcggggcatcgaacgtcaggctcacacgtggttgatatctctaggccgagacgcaacccggatttatcaatggactcttggatatcttgcagggcgagcagaacaatgcagtccagctctctggtgtgtctttggatgttcatattggttcgcgaagacttctgtctcttactgacccccgctctctcttatagctggtgtttacctgaagaaccgtattacacgcggatgggccccggtcgaagatagcccgcagcgtacgccaattcctgaagccgaaaagcccagtttcagggagagacttatccctgcactggcctcgacccctcccaatgtccgcaatcaactggtccccctcctccagaagattcttcaaaacgacttccccgagcagtggcccggattcttggatcttactctgcagctcctcagcaccaatgacgcaagtacggtctatgcgggtctgcagtgccttctggcggtctgccgggtctacaggttcaaggccggtgagaagagagaggagttcgataagatcgtggagcattcattcccccagctgctcagcattggatcgaagcttgttgacgaggagagtctggaggctgccgagatgcttcgcattgtggtgaaagctttcaagcacgcaatttacgtcggttaccctgattctagtctggcgtggccatgccatttatactgacctgctacgaatttagttcgagctttctccatgcctacaaacccaccaggcgactgttgactggtgtacactattcctgcgcattgtctcaaagacaccccctgcgagctcaatggcggattcaaaggaggagagggagatgaaccactggtggaagtgcaagaagtggtcatacgccaacctgaaccgcctattcatcagatatggcaaccccaccacaatcacgaaatcctctacccccgactacacaccgtatgcgaagacctttatcagcactttcgcccccgaaattctcaagggatacctgacggagattgacaagtgggtttccaagacgcaatggctcagcaactctgcactgtcgtatactttggtcttcatggaggagtgtgtcaagcctaaggctatgtgggaccacttgaagccgcatatggataacctgatcgcccacttcgttttccctatcctgtgccagtccgatgaggacattgagcttttcgaagatgacccatctgagtatctccaccgcaagttgaacttctatgaggaagtgtccgctcctgatgttgccgccaccaacttcttggtttccctcaccaagaaccgcaaaaagcagaccttctccatcctcacattcgtgaacagtgttgttagcaaatatgagtctgcgccggaggatcagaagcagccaagagagaaggagggagctttgagaatgattggctcgctcgcttccgtcatcctgggcaagaagagcccgattgctgaccaggtcgaatacttcttcgtccgtcacgttttccccgaattccgcagtcctcacggcttcctccgtgctcgtgcttgcgacacactggagaagttcgagcagcttgatttcaaggatccgaacaacctcatggtcatctatcgaaacatcctcgagtccatgaccgattccgaacttcctgttcgagttgaggccgcccttgctctgcagccccttatccgtcacgatgtcatccgtacatcgatgcagcagaacatcccccagattatgcagcagcttctaaagttggccaatgaggtcgacgtggatgctctggccaacgtcatggaggactttgttgaggttttctctgccgagcttactcccttcgctgtggcgctgagcgagcagctccgcgatacttacatgcgtattgttggtgagctcctggagcgcaatgccgccaagggtggtgacgaagatggctacggcgatttcctggatgacaagagcatcaccgctctgggcgtgttgcagaccatcggcaccctcattctcactctcgagagcacccctgacgtgcttctgcaccttgagaccatcttgatgcccgtcatcagcatcaccctggagaacaagctttatggtaagtttttcaatctatcaagcttatgtccacctctaattcggtattttagatctctacaacgaaattttcgagatcattgacagctgcacattcgcatcgaagaccatttccccatccatgtggcaggccttcgagctgattcacaagacgttcaaggctggcgctgagctgtatctcgaaggtaagaggttcaaataagttcaagcggttttgaagacctattaacttttctgctgcagacatgctccccgcccttgacaactacgtcgcttatggcaccgatatgctagttcagaacccagcttacttggatgctatggtcggcatggtccaagacatcttttctgacgagaaggttggtggcgttgaccgcatctgcggttgcaagctcgctgagaccctgatgctcaaccttcggggtcacattgaccagtatatccccatgttcattgagatggccatgcgggttatcgacgccggcgaggcacgcactaagtcgtaccgcatccacttgatggagatggtcatcaacgccatctactacaactcagctctcagtcttcaggttatggaggccaagggctggaccaacaagttcttcagcacttggttcgctaatatcgacaacttcagacgtgtccacgacaagaagctctcaattgccgcaatcagctcactgcttactctgaaggctaccgatgttccagtcagtgtccagcagggctggccaagactcttgcagggtgtgacaaggctcttccagaccctgcctgctgctctcaaacgtatgtttcccccaaccccccgccatgttcccccaaggctaagactttattcagaacgtgaggatgctacgagagagtctgacttcaccctcgatgacgaggatgatgaggatgacgaggacaatgactgggatggagatgttgagtgggatgagaatgaggttgaagcagctcttgaggaagacgatgtccttgacgagagtgccgcatacctcgacttcctcaaccaggaggctcaaaagttcggctcctacgccgatgatgacgatgatgacatggacgaggaaagccttctggagacccctctggacaaagtggagccatatggcatgttcaagcatgtcctgctgagtaagtagcctctacgaaaatatctccttcacgtatcacctgctaacctcaatttcaggccttcagcaagaacagccccagctctacgagagtctgaccaaggttctcggtcccgaagagcagcaggtcattcaaggcgtctttcacgaagccgacgccaaggccatggttgccgctgccaacgcagaagccgccgccgcagcgggcatgcaggccaacggcaactaagagactataaccgagatggattgagaaaaacaaaaaaaagcttcgaattttcaatgcctcggacgtctagtctctattcatttcccccttccacattttcctcacgagaccatatgcccatttcatgtctttcccgctttctagatcatgtcccatctgctctgtaccccagtgtttcttccgtcatgtcttttttctcccatgctctcgctgatgtactcttaaaagtcctacccgtggacattctgctcgagggtattcccccctccccttctaatcctcttcgatgcacagattcccctgaagacaccctcgtttcgtcatgatatagtacatcagccaagctacgaatgttggattccagttgtggaacctgtagtaccgtagataccagccacataggtgggctcgggctgaatccacatgttacaagaacatctcaagattactcgtgtaggtatttattaaggatgcccaacaaggcacaccagagaaagccacgttggaagcaaccgggggaggatcggccaggggtgtagaagaagatgtgaggtcaaaacaaagatcgtagaatgacgtcatattcctcagaggcattatcagatcccgacgtcggcgcgcttcacttttgaagtcaacttgaagattcacatgcttttacgctataaagcaaggcaagttctagagtcataagatataagggcgctggttcaaagaagtggtagttctaagcaaagaagtgagaatgtagcctatagtacgcatctatagctatacagcctcgtggtataactagcaaatcaggattcccatacaattcagcatcaatgcacatcgtataccgctattgtagttaaaattcgcaatagcattctcgattggtagtatgtaggtagaatggagcaccttgtttcccaagtgccactccacaacgtcatgatgatgacctccgacgaccggtttaggctggtaacgtcagtcaacttccagaataaaataaaaagcgcgctgttccttggattttactgctttaaacacaaatattctacatccaacactaagactacatccattgaaggtcagtatcaagatcaccatatcttatatttcattttccctcttcaatcaaagaaacccacacttatccctctattcagcacatcgaatccaattctacaatatccacaatgtctgctcccaaccccggccgccaatcccccgatccggagcgccaacctggtgcccagcagcaggatgtccccggctctggcaagaccgaagtcggcgaacacccagcacccgagttctcgcagcaatcgtcagagtactttagggatcatgtgctgacgagcaaccccgagcacccgctagagaagattgaggcggagaagttcgctaagggaaaacaacattgagatgggtatttcttgcatgtacttgggagagtttctgattttgaaatctggataatgatatcatgaagaataagctcaaataactatcttcctttgagctatgtacttattaaacaatgcataaaacttgggactgtgatcatgtcttttatgcccatttgctttacttatcgggaacctcatggatggttatcaacggctcgcttgtagcgagagttcaaattgtcaggctatcacacaggcagaaggaaaatagactatggacatggcatgacataataagaagggaaaagataaagcaatagacacaagcgaacacgcccagcgcaaatattcatctcctcattaagttaggacctcattccaagaatcccttacgacttctcaacaggcgcagcagcagcctcaggctgagtaacagcagcgggttcagcagcaggggcagcagcagtaggggcatcagcagaggcaggggcagcagcctcagcctcaccagccttaccctgcttcagatccgccagacgacgagcctcagcgtaaatatcgcgcacctgcttatcggtctgaacataaaagtcacgcagcttctggccagaggggtgacccagtgccttctcgaagtacgagctcaggccgcgccagccagtggccgccttgttcgagatctggtagctatcgtcaatgcccttagcgcgctcagtggcattgtacttcttatcgaagtttgatagcgccgacgtgaagcggttcgagactccgtgcttcttatccagcgcgatcgccttcataatcgcattgtcgctcacgacatacccgtgtgccaggtactctgcgaaaatgcgcgatcggggcttatcttcttgggggatgtggtgctcctcttccttggtctcgcctgcgccggtcgcttgggttccggctaggtcttcgatgttttgggctgcttcgacgtgcacagcagaagttcctagttgggtctggtctagcaggagggcagttttggcagcgctgtttttgggattgggttagtttgggtttcatgtgggctgattgcgggcgggaagggtgcggggtagcttacgcctccttttcaaaggtcacagtggcagacttctgagcgtcggcttccccagagactggggtgatggagagggtgacaatctttccactatttcaagttagcaagttgttaagataatgtactagttgcaacaatgtaccagaagctgaagaagtcgcgaacctccttctcagaggttgttgacgagatgccagaaacgtgaacagtagagtgagacattatgatgttggatagaggagagaaggaagaaatttgcgaagaaaatctaaacgtcacagcacttcccaggtgcgatgcgactatttatctagggctgcgccacaggtgacgtggtgacgtatggcggggcagttgcaccgcctcacgtagctaatttccttttttttctttcccttttacttttgctgagcgctttaattggactacatgattttcaatggagctgcctagaaaatggttttcacatgtcaaaaataggatttcgttgaatgtgtttgcctgcaaacctcccgaaatgaaaatattgggcactgtccccaggcaatgcgaaagaatggtatgggttggaatggaaagttgaatcaggcaccaatgattctttcagacggcgtggcagaagcctcgcttgcagaatcctccttctgtctctttagagtctgctccagatcgcgcacccgcctcctgagctgttcgttctcccgcttcatatattccacttccaacctgtgatgtgtggcctcctcgaaccgcgacagcgaccctccgggcgaatgacctagctgcgactgtgataccgagttccggtgtgggtatatgttgctgttattgtgggagaatgaggatagtgacccgatggagggtcggcgagatgtgagggatggctcgcgactgcgaactgttcgggaatggtctgccgggcgatacggtatttctcgtgatggggcaattccagtaacacttgcagactgctggccctggtttgctgaagtatgcgaactgagacttgaattggaccggttccgtcgcgcggagtgagacggggtcgagctactgagggtgggcgatgcccgtgtgccgtctgcctcattaaatgttgatgtcgaggaccctgtcgatgccacggatgcggtttgctggcggagaatagatagctctcgggtcaatcgattcacctgcggggagttttgatgcgtcagcgattgaggggtaggtatactttggggctctggaattccactcaccatcgcttcttgctctttctcaagcactagatggagatccgaaggtgtcagcggctgaggatgacgcagtggcccttgttctattagtcgggaatgctcattgaagtgacgcctgccactgcggacttaccctgagcagtacttgtgatgccatagtcccctgttccaagtggtggacttcctgggggaagtgttgcagaagtatgagggccatgtactggttgtcggggtgttggagactgcgataccatagcgggtgccgttgttgctgcacgaggtcgtgccatagtagagttggaaacagcgctcaggtcgggagccatggccgacaggtatgttctgataatattgtttaaacagtaaatttgcttttccgctgtggcatgtgagtcgagaggaactataaatgtttcagccttgggataaataatcagtaacagtcagatctccggaattatgaatcaaaacaccccttgatgcaattccagggagattcttgaaacataccagttatgtcgggggtgatgttcaaaggccttactcctttcgggaaggggattgagaaagggcaagagagaaatccaaaaagaaagttgggcttctctcttgccgtgagatgttttgtcctttgtcgcttttgattggaccgtgcacgtaatctgcatctattgtacatgtacatcgtagctctagagataatagtgacattccaggcatatgttgtaggaacacctacactatttacctagttatggaaaggctgacatactaaagtgactatttggtagctataatggtataatccgtgaatatctctgttaatctacatacaattagttcgtatacaagtgaacggagatggtacagagttgacatggtgctcaggccccttttgaggcatattggatgtctcaatggaagctatctagtaaattggggcaataatagactcaatttattgttgatcggcgtcttccgcctataagcccccaagagaacgtcatactcaagatatcataccttggtagaggcttgacttccctaacaacctgggaagctccacctcaggactggccccgggggatggatgatctgcatgttacataagctatccacgaaaccttggaagagctaaccagttcgacctcaacaatatccctgtccatagtggcagtgaagccttccaagacctgtcaaggtctcagcttgtctctcccgatatctaagcttgcatagcactgccccccgcccaatgaaaccatggcccgacccaactcccctgacgctacccacattccacccgctctgaaaccgctcgctccttacgtcaagtcgcgccaggaaacccttcaaattcgccaggcactgacgtcttatctgcgctcatttatcgaattcgacgatcagtcaagcgatcatgctcaatcccacctttccctgtgtgtctcgaccgatgctgttactgatgtcaaacgtatccctaccgacctctctgggctgagaaaggattatctgaaggcattggcggccaatattgcggctcgcaaagagttcgcgttggcgtctgagaacgtcgcctcgttaaggcgccagaggacgtccccgaaccgcccttctgacgacgctgatctgcaagaacccggcaccgagcttcgtgaataccttgccctcctacgcgaacgacgccgccataccaagctgcaggtgtttcagaattatcttgaggaaattaaaacgcgcgatacgggcagcttggtggacgttggcaatgatggggagcagatgctgttgccggaggtagatgcagaggcgggccgcgatagctctgaaacggacttggatggtctagtgcatagtctcgagagagcagttatttctgccagaactcaactggatcggcaaaagcaattgtttgagaaagccaaggcacagcatgatccccgagctgagacttcaggcgctaaagcaaaagcattacaaacaacccgggatgagctagtacaatgggtggaggaacggctagttggtcaagaggatccggatgagagtcttctccaagaacttcctccggatgaaattgaagaggcccagcgggagctagagaatcgcaagatacaaattacggagcaatatgccacatatctgcgagcccggcgagatctcctcgacgcagcgtccagagcttgtcagccagttaatgtggcccagaagcctccctcacgaccaaccaacaaaaatgaacttgccatagccgaaatgccaccaccaaacccaatcgacgttctgtcgtacacaaacgaaaacctggttccgctacttaagagtgaaaagtcgctggctctccagaaatcgtatttatccggcttactctcaaaggaaaagtccacgaccctccgcgctctcaatcgtttaagcgacgaatcccacctactccccgaataccccactcccgcccgccagccgcgctttaatcatgcggctgctgctcttaactcgcggatccagacccagacctccgatcagaccccggatgaggttgttgctctggctgaagcatgggcatttgcttctaatgctgcagctgccaatggacgagactttgttcaacaaaagatcgcattgggtactgaggttgcgcaggacgcccggcagaccctggctgatgtttgtaaaacgctcaaccaggacctcgatgaggtcatgctggagagtcaggaaagccgagatgtgtcggattcatgggcctccgacactcgctccgcgaaggggatgtcgaggggtggcgggtctcggattcagaaacaaccgagtggtccttggtctcgtctgaatgggagagtgggggttgtagaataattcattgcgttgtaggcattgtaatagttatttctaatatataacatattctatccgtccaattcggtttgatccaaccaggtgcgttggtattttggtgtagaggctgctaaatatataacttatcagaatgatgatgaagaaaacgctgctgtgttgtcatggaagagcccgcgagggaccaacatgtagacagtgaaggacaattactataaaagaaatgcgatattactgtccaaaggtgaataatagatacggcaccgagtagagctagttagggccgcaaggaagcaaaacgctaagatccttctggtacctgcctggtttcaggccaaaggatggtctatgaatctatttgactgccgtgttgatttccaaaaatttaaaaattcgtgaatggttacggggtatagcccattccaagggtcatgtgtatattccttgtcaggttgaagtaaaaaggggaagatacatgtttggaagcttgtgattggctaatttaatatttaaggggccacatacccaatatgcatggatggatccatggatgaggctcctgtttcccaaggttctaaaagacctgctactagtagaaacaagtgtcccttccgatgactcttacaagcccagatgatagggtcccctctatatattatttactagtgcgccatcctatccctcttcgtaactattcaatcgcatcgttctagagaccagcttaaacaagatccccctttatatatagtctgcctatctttcaatctcggccgacgacatattcaacctttgaaatccaccatgcctactacaataaacaatatcttaggcacgccagtggggccaacgtaaatatcatcacaatctatgtaatgaagctctatgcccacctagcttcagatatcgacgccttcagtactggccctgagaagtactccacagatactatctgggtccccacaagcggctaacaacggactatgtaaaatcatgaccacaaaggtcaactaatattttaccacaataatattgagcgaaccttgtaagggtgagcggaccactaagcagccgtgagtgcctaggtgcccatgtgctcactgagcaacgagcactgctcagggaccataggtacatcgcatggaataactaagactttgggtagtagaaagggaggtaaatcggcgtctaaggttcaccgtaagccgatttcggtaggcaatttgtcgacaattagggttgtggtgtaaaattataacttgaagtcaagagataagagttagcgttggggtccggcatcggcatagtccacaggaagatcatcgtgtgatatgtatgtgtggggctttcctatttgatctgccgccgcttttatgagggtgctcaggctcaggctcactgagtagatgtcagcacggactcagatcagtgatcatgctcagttcagtcacgtgcagaatgacagatgctcagtgagtgctcattggatgctccctgattattcagtaatgctcagtgtccaatcagtgagcaacactgatgcactcagcccaccgcagactatacccagaagggattagcccccacagggtcgtctatactgtgatagttagttcgttgatagcattgttgctgacctcaattttggagcactactagtgacagttcgtgcaggccgtcagattctcgcagtcgaaaacccgaacacaatgcgggaacgggcccatcccgcgctcgcaacacatgcagggtgagcttgagatgtccccaacaatgtaaccgagggcacattcgaccttcgtggcgctctcgccaatgttgtgttcaagagagctaggcaggtacgctctgttgttccgcaccaggagctgccgcttggcctccattttgtcgagggtcactagagtctcagtctttagggcgatcctttgcttctccacggtgtaattgaccttcttgacttgtttggcctattctccgggtggcctttcttcactccccgatgggaccgcaacaagctcgacgggtgccccaaaggacaaattggctgggccattgtcacgtctaagtagtggaagagaggaatatagagcgatgaaatataagaggttcaatggttgggatgatagcaaataggtacctttctttgttcagtctttgttcaagccgaatccatacttcctaaaagccttagtatcaaatgactttgttggagatcacacattaattagctagcccatcgttttttcctttctccacgcaactatcctattttccagagcatactacatctcgccgtagcatctctatcaggttatgagcgcctgtcttcgaagcctctgtctaatcgtcgcaagattcaaatccccattttacctccccggcgtactgcgttgcgccaagcctctgtgtgggcccacgacagagtttttcggatcggggtctccgatcctaccccacttcccgagtatttctgattcgaccaatcagagctcgccatacgtctgtatctagagttcatccatttgcattctcctgcatcaattacgaccgtcaaaaaggccgttcggatcattttacgtcgaccgccatcagaccgttcgttcgatccagatcctccctctgaccgttcgagaccgttgcttctcgaccgtcgtcctcacaatttcttgactgttcgacctgtctcgaccgtcatacttttccatagcggacgtcacaatatcgtccatttatgatttcgatcaccaaacggagtctaatatctccaagatcgtccccaaactcgaaggggaatccaatttcgcccaatggcagcatcgtctgtatatggcgctgaaagaaaataacaagatttacatcgagataatctagggaattgcatagaaaccagtctccccggatctctttgataagtctgtcgaggttgtgcatgagctttctctgcacagggccgctagttcatctagtgaccccaatgttactatctctgacgtcgtagtcagagaacttgttaaagaacagaagctcaagaacaagaagattctggaaaagcgccaggttcttcttgacaagtgggatcacgtgagcacactgtcttgtaacttgatcttcagcaccctcgatactattcctgcctcctatatccagaatgtggagaacacccgagaggctttcaagcttctgcgtgccgaatatagatcgtcatcatggcagggaaacctcaagcgctttgaggttcttgataatatccaatacaagaaaacagcaatccccaggagttcgttcgtcggtttgaaaaagcatcttaggagctttgtttcgttttccttctttcctttttctttttgctttcaacgatttacaatatcttaaatattgtgaattaattctcttcttctcttctttcccagaccttttatctccaaagcatctatacgcaaacctgcttgatcagcgtttcgcgactcaacttcacttatcaattccctgggaattgaaatggaaaaggatctaactcaagaaacccttccttcaatagattcgtcggcatccttacgcgcgaatctcctcttttatagacaaccggcccgcctccgagtacgtgtagctaggttcgcaccacccaaacaccgtcaccgacgcaccttctaagcaaaatcttgcagactaaaattctgctactactgcttactataccccgcaacccgaggtccgccctacgccgtagtacacgccgcagcctgaggtgcgacctaatatttcctcggctaacacctaaaccctccaccgaccgcccgctcgcctacctactaggactaccttcaccgtcctccccagttatacgcgcccaactcccatccgggcgctgcggtaggtatagcttaagcaataagtccgttcatcaataccttgcctacgggcccgcgtagtctgcactcaaagtctgacgcgcccgttcctatagatccttcgcttccggccaacaaccccacctatccttccccctactctccctaccagcctcgggggtatgagatagcgcagtaccagggtcacccccctccgcctcagtatatatatacccgcgtccggattggccgtatagctatagacaacagtattatagattgccgggaccttacccttcccggctacaacggttggtgtctactatgatttcacgacgactgagggttcgaaccgaatcgcgaatcacaatcctacctcattcaaccacacggcgaatgcgacgtcaacaaaggactcagcagcttccagttcgaataccaattctaacaagaaggatagcaagaagaatgaaaagtcctccaatggcaagcagtcttcgtcctccaacaacaagaaggacgcaaattggtgcaagctacacaatgctctcgggaatcattatacccggaattgccacctgcaaaagggtggatctgctaatgcgatccatcagcagcaacctcagcagcagcagcttgcacaacagactgcttctcaattcaatttccagccgcagcaggtccctgtcccgcagccaggacaaatcataggtcatgttgatagtcagggacgggtgatctctatccccccgcagcagcagcagagacctcaggctaatgcggtttgccctccccctccccctcagcaaggcccttcctccggagatccgctgctacggtacaacaatctatttaccaatacgatcttccagaccgaaacccaaactgacattcctaggggggttcatgtgatctcaagaaggctagatggccgatgccggcggtgatactgccagatggatgatcgattctggcactagtatatatatgacgccgcaccgctctgtcttcgtcaactttagacaacgcattttgccagtgtctacagccaccggagatgtgttttacaccgagggttacggagacgtggtcttgaaactgtttaatcaggatcagaccgaaagtcttccttcgctcacattgaaaaaggtctggctagcccctgaattgaaaagtcttatctcgatgtcagctctcgacatagatgatatcggcacctggacgaagaacagattcatgacatttaaacaccaagatcagctcctcgattttcatgaagtctatgctattgtcgcaaagccaatgtcttttaaaatcttcactctatcgctgcagcaaaaggctggtttctgcatcatgttgacattatgacagcattcctctatgcagaattggaagaaccgatcgagattggattgcctgagggactggaagaagaacatccagccctggaggctgcattggcttaagaagtctatctacggactaaagcaaagtccgcgtgagtggtatcggttgctacacgacgttcttgtctcaatgggattctatcgtacacaggcagatcattccatcttcatcaagaaagatgagaaccttcataagcatggacatgacagtcttcatacagataacagtctgtacgtcatggtgtatgtggacgatctgctagttttgtcaccttcgggagaaatgcacttccaggcattgaagagagtattcagataccttgctggttctaaaaacctttcaatctcgttctctccacaggaagaccctgctctctgcggttactgtgacgcagactgggctggtccccatagtgagaaaggactatccacttccggctttgtgttcaaaatggctggtggaccaatctcatagactagcaagaagcaaccctgtgttgctctctctacaatggagagtgaatacattgctgaagcactggctgtacaagaagctctttggctaacatagctgcttgttgaaatcggcatcgaagattttctcaaaaagcctattccaatgtatgctgacaacaatggagccattgcattggcttcaaatcctgaattccatgccgcgacgaagcataccgccattaggtttcaacgactcagagaagaagtcgctgctggctcggtgtgttttgttaaaatccctacagcagaaatggcagcggatggtatccgttgatgacgaaaccgcttacaaaaataatatttcgaaggtggattgcacatatcggactctatgtctatcagaaggattaattctggtctgcttacaaaatggggggttttcaatctgtgcttgtgaagcttttgtttttacgtttttatcaagggttgttttcactatggaggctagtatgtgttttgtcgtggggggtgttggagatgtgactcacttgctcctacacacattagctagctcatctctagatggtttcttcctttctccacgcaactattccattttccagagcatactacatttcatcgtagcatctctatcagactttctttgttcaaagcgaatccatatttcctaaataggcttagtagcaaatgactttcttggttgcttcccgaggtcctttcttctttcatccaccgctgttccatccatcactgtttcatctatcactcttctgtcctttcgattcacacggaattgcagattttaagcaggcagatggggggtagggttcacgaagaccccccctgaaaagcttctaggagacccgcggttattttggaggtcgccaattcggagacttacaccaagctctgccgtgatgctcagtactggatagatccagaaagacaggaggccaatgtagctatcggagttagtctccatacaaaaaggcccgagatcacaatcgaccagtgggaatggagttcccaaacctcctgccctatcaacaggactcactttaccattagtagggaatctcatggtgcagcctactttgatccctttcatcctctacctcagctcgtgatcccttttgaatctcttcttcaccgcacaaatcaacagagaacgtgataaattctcattaaccatggaaaatccccggacccttctggcgagacggcttcccactctgacacaacttgggggaaccactgagccctcggtttcgcgtgaaagactgtgtgcaagttatatgcgtgtctggcccgatttccaacaacaggcactggaagcttgcagctccataactttcaccggggacgtcagcgttacagattcccccgagggtgatttatactttgtcggtagtgagctggggctgactactcggtttgcgcgacatgtatgtgatgctgtctcaaaagctttgtccgtgtcaaatctaccattgcagttcggagacatgcaggcgattcgtcagaaccccttgattatccctggtgtcaccttggccatccttgggtctaatccagctaggctcattgcggccggggtactcaagacatggtggactgtcgacctcgaggagataaccgtgacgtctgatttggacgtgcggagataccttgaaccttttatcggtgcgtcattcaaagtctgcttgcgtaaatcgcttttctaacaataccataggccaagctgtcgcttacatgaggagattcaaattgcgttactcttttctctccacatacaagtccacagttttcataaagagagaagatgatttctgcttccgtttatcgatgcccataagcgaagacgccaccaatccctctctgagagaatgcttcgttgggtttgcagccatcgccgcgcaagaccccgtctacgaggaagatacaagaattgatacaagacttgtaagtctcctgttctatcgagtatgcagatattgatcagaaaaaacagctccactcgtcgcgacagcccggctttgtctcttcccctcgagcatctgcgtaccgcagtaggctaggcgactctacagactcgcccatccttcccattacaacagagtccatgctcattggctccgacggggtcgcaagccatattgtgaattgcgttgagctcctgtcatcccctcggttgggacaccagaaggcagtgtttgaggtggagtctggtggcgtccgctatatcgcgaaatgctggtctcacgatcgccgtgaaaggtatgccttgtccatgacctgcgactcctagaatactgacaagaccattaaaaacatagcgcttctaatgaattcgaagtgtacgaaagactacacgagcttcgaccaagtggcttcgaacgtttcacccgccttgtgttctccggtgacataatctgttcggcacagttccccgaaggcaagatccttcttctagagaaggttcctggagaacaactatttggtatctggaacagtctgccggttgctgagaaggcccatgtattcaatgagtgcagtagtgccattcagtctctccggtcaatctccattcggctattagattccggaaggcacaatatcctctacgaccgcatgagtgggaaggtgacccttgtggactttgaggcgattgacgacctcggtggagtgcgagtgacgtccctcaaccctgagctagtttcaatctttggcgtcaccggcatgtcccagttcatccatagcggatgatcggttgcttcgcttccgtttttattttacttcgttttcttcgttttgctttctttataaaaaggtatttttacgaaacatggatttaaatcctccacttgctctttcttatggggttattgttagtttgaaaacaaaaataacaatatagagtacggtcagtcaatacggaacaacgagtggaatgaaggctaagctcacggtggtaaattcaaaagcagtatttctgttttggttagtagtttggaggtagaggaatgatgaagtccattgttctcggagcaagtgactagatatatatcccttttgaaatggcatcactgtagatacaagtgctagggggagtgatatttagagttcctaggattcaaacgaaatagctgtgggcccttaggactctggtaattcagcttagtggggctcctaggagcttatcggtgtattactattgatggtttgtcaaggttcggcttacagattacttagcaatagctgtaccgttttacggctaggaaatcctttggcttatatgtgcattcgcgagagacgtggttaagtatcgtcacctactaactaaacactaattctctagttacctgaataggaaagattctagattttcaaggaaacctatccaatcgccctcgccctagtagtagcctaaaaccggattgggggatcgccgggctagtaagcgaattattccgagcggtattcccagcagcataggctggaacgggaaaacggtagaccaattgaatagccccactgtaaggttcttttttacttagataggatcgagaccgctagcacgaacggtcacgttgactgtgctagtccttttctgataagcaatctaaatggaaatcgttgcacgtgataggattagtgtgtcgcattttattgatgtagcttacttagggcgcttatccctacactcagtgagcaaatcagagagctcagatgatcatcagtgagtggatcagggtgcttaggggatgatcaggtgatgctcagtgagcacctgggcggataacctcgattatgtaatggctcgtgatcgacctcccgaggtcgggagtcaggggactcagggacgtgctcagttttactctgtgatcaaaaagcggcgagaggtgagcactaaaacggaaagggaaaggtctcgagtgccagtattatccggtacaaatgatgttcttgctggaagctcccaataattgtctgctatacactctataacccctatatgaatgacaatataaatatgacaatagagaattccctagccttatttacatgccggacattggattttatacataaaagagatttgccgagtggtccctgtctccacatccgggattttgactcatcgctgtcaactgggaaaagaaaaagaaattatataatatgcaaaaaaaaaaggaggaaaccaggaaatacagaaacagacactcttctttgaattattcacactcattattagatctttcagatctccctacaacattaggtatatatacctacaatcccccaattctcccccggctttccctcgttcttcaaaagtggagccgtatacggtgaagggagcgggccaattagcgactccgagccggaaaaaaaaaagaatcccagcaaagcgtagactcatcctcaacacatccctcagcaattgaaacattaccttcggtgcgcaatggttcttgctgctcgatgtgggcaggcagccgccctgctgcgccagcgctgcattgctgaaacccgcccggcactctctctgcgcgcattctcatctcagtccgtccgttcgacggcctcgactctacgcctgcaaaagatccccacgactcggtctcagcagctccgttctttctccagcaccttgagccgcctttctgctcagaagccccctgctgctgagtcttaccttgctagcggtgcggtatcgacaggtaccaacctcgtcgatgtcaagaaggtcctcgtcattggtagtggtggtctgagcattggacaggctggagaattcgattattccggtaagttggaaccatccggggatggaatttcgcgtcgatcgaattgccccgtcagtcccccgacgggggtctggtcgcacaggaagcttttgcggagagtacagagagctcaagaaatggccccctaaacatcagttcaaatgactggaaactaatctctcaactgtgtgatcaaataggctctcaagctcttaaagccctcaaggaagccaacatccactcgatcctggtcaaccccaacattgcgaccatccagaccgaccacaagcttgcggacgaagtctactacctccccgtcacccccgaatatgtcacccacgtcattgagcgcgagcgccccgatggtattctcctcgccttcggtggtcagaccgccctgaacctgggtgtgcagatgaaccgcatgggcaccttcgaacgttacggtgtcaaggttcttggcactcctatcaagaccctggagaccagtgaggaccgtgacctcttcgcccaggccttgaacgagattgatattcctattgccgaatcgaccgccgtcgagactgtcgaagatgctcttaaggctgccgaggaggttggctaccccatcatcgtccggtctgcttacgcccttggtggtctgggttctggcttcgcttccaaccccgatgagctccgtgacttgtcctcgcgctctctatccctctccccgcagatcttggtcgagaagtccctcaagggctggaaggaggttgagtacgaggttgtccgtgatgctgacaacaactgtatcaccgtttgcaacatggagaacttcgaccctctcggaattcataccggtgacagtatcgttgttgctcctagtcagactctgtctgatgaggagtaccatatgctccgcactgctgccattaagattgtccgtcacttgggcgtcgttggcgagtgcaatgtccagtacgctctgcagcccgatggactcgactaccgcgtcattgaggtcaacgctcgtctctcgcgttcgtccgctctggcttccaaggccaccggttacccacttgcttacaccgcggctaagattggtctgggacacactctccccgagctccctaacgccgttaccaagaccaccaccgccaacttcgagcccagtctagactacattgtcaccaagattccccgctgggatttgagcaagttccagcacgtcaaccgtgacattggctccgccatgaagtcggttggtgaggttatggctattggtcgtacctgggaggagtccctccagaaggccatccgtcaggttgaccctaaataccttggtctccagggtgataagttcgatgacctcgatgagactctccgtaaccccactgatcgccgctggttggccgttggacaggctatgctccacgagaactactcagttgacaaggtccacgaactgacaaagatcgacaagtggttcttgtacaagatccagaacattgtggactgcaacaacgaacttaaggagatcggcagcctcttcggcctcaagcaggagatcctgatgaaggctaagaagctcggtttctctgataagcagatctctctcctcgttggatctaccgaggatgatgtccgtgcccgccgtaagtccttcggtatcactccctgggttaagaagatcgacacccttgctgccgagttccctgccgacaccaactacctctacaccacctacaacgcctcttcccacgatgttaccttcgatgaccacggaactatcattctgggcagcggtgtgtaccgtattggtagctccgttgagttcgattggtgcgctgttaacgccactctctccctccgcgagatgggcaagaagaccgttatgatcaactacaaccccgagacctactccactgacttcgataccgctgacaagctgtacttcgaggagctcagctacgagcgtgtcatggatatctacgagctcgaggccgctagcggtgtcgttgtctctgtcggtggtcagctgcctcagaacattgccctccgtctgcaagagagcggtggtgctactattctgggtaccgaccctctggacattgataaggccgaggaccgtcacaagttctcctctatcctcgatagcatcggtgtcgaccagccagcctggaaggaactgacctccgtcgctgatgccgaagccttcgccgacgctgttggttaccccgtcttggttcgtcccagttacgtcctgtccggtgccgccatgaacgtcatctacggtgtcgatgagcttaaggagaagctcctgaacgcctctgcagtttcccccgaccaccccgtcgtcatcactaagttcatcgagggtgccgaggagatcgatgtggatgccgtcgcttccaacggtaagctgcttgtccacgccgtttccgagcacgtcgagcccgctggtgttcactccggtgatgccaccctcgtcctgccccccgccaacctcgaggagcccatcatggcccgcgtcaaggagatcgccgagaaggtcgccaaggcctggaacattactggtcccttcaacatgcagatcatcaaggccgaccaggagggtgccgagcccgctctcaaggttattgagtgcaacctccgtgcctcccgctctttccccttcgtcagcaaggtcctgggtaccaacttcatcgacgtcgccaccaaggcactcgtcggccgtgatgtccctgagcccgtcgatctcatgaaggtggagcgtgactacctcgccaccaaggttccccagttctcctggacccgtctggctggtgccgaccccttcctgggcgtcgagatgtcctccactggtgagattgcttgcttcggtaaggatctggtcgaggcctactgggcttccctccagtccaccatgaacttccgcatgcctgagcccggtgagggtatcttgctcggcggtgatgtctcccagccctacctggccaagattgtcgactacctgaaccctcttggttacaagttctttgccgtcaaccccgctgtcaaggcccacatcgagtccaccgccaaagacaacgtctccgtgcagctgattgagttccccaagaaggacaagcgtgctctccgtgaggtgttccagaagtacgacatccgtggctgcttcaaccttgccaagacccgtggcaagactcagcttgatgaggactatgtcatgcgtcgcaacgctgtcgatttcagcgttcccctcttcatggagcctaaggtatgtttaacgtgctgatgcccatacacgattcaggttgctaactgatcctttctacagactgcccagctcttcgctcagtgcatgaacgagaagctgccccgtggtgagggaatcccctccgaggtccgcacctggtccaacttcgtcggcggcaaggcgctgtagatctctatttctttgcacaaagtgacagaagaagagaaaaaaaaaagccccaccatgtcgaacaaagagtgagacgaagtcaacatctctctcttcccctcgatatcccctatgacctcaggtcttcccgtcatgatttccaatataggacaggacccaaagttcctgtacggtgtactgagtagggcaatcttgttgatagatggcgtgcattgtcttttcggcctttttaattattgtactctcggattggaatgttgtcttttccttatgaattgttgaattgttcctcgtctctactctctactcaacggcgcattaagatcggacacagtagtgctcatatgcccctgatcttatgcgaatttgacctttaagatccttctcctctgtactccgtattattcatttccggctcggccacaatatccgtccgttggggctatgagggacttgagcctcctgtgggcgccaatcagacgaacgtcgatgtctcactttaaagggcccgttgcatgacagcaatctctgcggccccccctccatccatcggaatttctgacctctcatttttccctttaactcctcttaacttcaacctacataacttaggtcttgactgatgcttacaggtcacaaccgtagaaggtcttcacgaacgtgcctttgatttttcaacacgggccctaaatcaaattacatgtcagcgctaagcttgagtctttagtatgctatagtatagcgctagcatacaagcgatgcttggcttccggaaccccatgacccttgtcggggtcccccattgggcacgctagttatgaggcaacataagagtcttctgtgttttcccactgcctccttacctctttccttctgcccaactccagtcacacccatttctacgaccctgaaacccacccaccctctcgaaccttgcaagcatgcgcttatctgggttcctcgtttctaccctagcggctttggccgcagccaacgagcccgacacaacaaccatcagcttttttggagacgatgactcaggcgtcaatatcggcgcctactccagcaccgcagggcgagttgtcggcatcgacaagtacgccacgacctatgagatcggctgcatggaaggcgcagacaaatgcgcgttgaaccatcccgccaccatggtccagggcgacaccactttcagcatctccatgcaagtaactgtgactactggcggtgcaacgggccacctaaccgccgtcgagtcatgcagtttcacacgcctttctgaatcggctgtctgcacttggagccttgattacactgccatgcaggatgatctcaccgtttccgaatccacctctggcacgcagtctgtcccgtcgaatttggtcacctatcaccctcttaccgtcacggatggcatctatgctttcaaggctaatgcgacggcttcgacttcgccggtgaagatcacccctactgcttctactgcttctactggtggtgctgtggctgccatgaagcctttaatcactgctgcaccggtgggtgctgctgctgctcttgctgcttttgcggctatgctctaggttttcagtttggttcttttcatgtctgatgtttagttggttgggacttgagtctcttctacgcactgtgaatgagctataccatgtgtacatctaataattcatccaaatagtgtctcaaactcgatgctttcttggatacgaattccgtagtcttaaccaagtatcaatttctgctttggaaaatttgttgatctttctctctctgccctcatctctgggcttggcttgcatgatataggatgcgagtcaggaaggtgacaacaataaaatggtctaaaagtaacattcggctaagagtaatatttgactggcagatattttgagcacaagagaaatttccgaatcgtctctcaagactctgatcaatcttctatcaatgccaagagattcaaaatacaatgacggatattcaccgcccccacgacgatccactctgattgtgatatcttcaaacaattcttatttctatattcagatcaatacaatggcatcaagaactacactaccttcagtgataaccaggactgttccacagcctgcccccaatggcatgggcaatggcctgtttgcaacagcccccatcaaccccggtgaagatgttttgcacatcaaaacgccatttctggcagtccttgattctccacgtttggaggacacttgtgctggctgctttggaaagagacaggtggaaactggaaatgaattgaaggcttgcaccggatgtcgtgttgtgaagtattgtgatcgggtgagtcgctatggagatagatcgtttgctgtctcatatttcttgtcctaccaaagattatgcctagtatgatattctaacacttgataactagacgtgtcaatctaaggactggaagtttgcgcattctcttgaatgcccaatcttcaaaaatgtcaagcctatggttcttcccaacaatgcccgagctctcctacgtgtagtgctgcgcactgcacgcaacaagtacgattctgaagaatccaaggtctttgatggcctggaaactcacatcaatgagatctcggagagccagggccagcttgataggattaacctaacggcaagagctgtcaagaattactcagggacggagatggatgaaggaactgttgcttcctatgctgccaaggtaattactttcagcctttgaatcttaacttgcggaccctttctgacatcacttatagctggatctcaactccttcaaccttaccacttccatgtatgaccgcattggcctgtacatgcatccatatgccgggttgattaaccacagctgcgactacaactccaccgtcgggtttgatggtgaagaactgtacgtcaaggccatgcgtcccatcaagaaaggcgagcaaatcttcatctcctatatcgacaccactacaccctacgacatccgccgcaacgaactgaaagaacgctacttcttcgactgccagtgcacaaaatgcaaaatgggaactgaaacccttgaagaccggttcttgtctacacccgaagacatgactcccctagagacagcagagcgtgaagccctagaactcatgcagaaagccaccgcatccaacaccgagccaacagacgcaatcgagaagctggaagctgctatgcacaaactccatgagaccaccctatggcctcttacccgtcaaccatatgcttctctacgcgataagctgatcatatctctgctgacggctggtaacttcacccgggcatttatccacgctgccattcgatacctgcgaattgatccggttgtctatgacaaagcccatcccatccgacacatccatgcatggagcctggtcaggcttactgtcttcatctcccaggagggcttccagcctgaccctaaagaccctgtgcagattcatgacttcaagctgaatttccattacttgatttggtacatccttgctgaacttactagcacacaaggggagagctgcaccgtgccaagctttagaaaactcgttggaaaccagtttgtacaggttcacaatgagttcaaggctaatggccttgatcctagcaagaccagggctgttctctccgctgagtggaacaagcttgaacgtcttgtcgacaaggctctagagaaagagtgaaaataccataatgccgatttgtttatcttgctcacaccttatataacaaaacagtagtacctaggtacctacctatatacccgaaatagcaggaacgacccgaagtcgatgccccgatttgtatatatggcactccgcctttgatgccggtcgacccttcctctttgggctgcggactatataaacaggccccaaccccatttttcttctcttcttctctttccctcttctccccccacatttgcattcatttcacattgcccacagaggcaattcaactcccagaaccaccaaaatgaatgcctttgagatggtttccctttcggcccgttggtccatggagaatggacctccaagcggccgttccaccgatgaggtacgtgtcgtccccgagaccagtagcgcctcccactacggggccagccgtcgggctgcgtccccccggattgccgccattaggattccggtgattcctcctggttatcagcagatcccagggtacgagacccaccgtcagcgacaggaagctcgcgcgctcatgggctcgattgcggagcgtcggggcaggccaacccccgccccaatcttgatccgtggtgatgctccgagtcttctgtcgcaccgacgacgttggtaagtcaattccatttcattcttgcttcttctagcctttcttgttttgactccatgttgttcttacttccttctcatttctttcttattttacatgttccacctgagagaaatttgttttacttcatttggattagactcagctgacttttgattctgatagggtccctgggtgccgtttgtgctgttgcctttgccggagccggagctcagcagctagccaatgagcacacccggactatgtttgggggagctttctgctggtgcttttggttaagatggtagtggggtttctgtagtgtgggggttggttctcgaggagttggctgcccatcggtgagacttattggtccgatttcgtcttcagttctgtttgctaacaacgtgacatacaggtgtcgtttctataagttctgctccccggagttgaccaccgggtacgagctcgtcaagtggtgagttcgtcccttccacctgtaactcagttccaaatgctaattcatcgatgaatagtttgagttggttaggtgttgtctccaagtaacatcctacaggattctttccgcaaagataagactgtcctcgtccattgggacatgcagagacaggcatacgtcgacattgatgcctcccaacagacgggcttcggagtcgtgatatatcatgtcaaacgttcatatcaacataaagacctctccaagtcaccaccctcgaacgtcgtcgaaccgatcatgttcttaagtcgcctactatcacctgctgagaagaattactgggcgacggagctggaggtcagctgcattacatggacgctgcgaaaggtccgccatttggtcgaaggagctaaggagcctgtcgtgttttacaccgaccatctcggttgttggagatgaacacgaggcaacagtcttccacggggatgtcgatgcgatgcgtgcgatgcgcatgggaagggctcgatctcgtcgtcacgtcatatatactcttaagtggttgcaggtcacatcaacctctcgaaaaacgccacctcttccctggtcgccagtcccgaagacgcttcggtaaagaatgctgttgcaacagtcgcctcataatcccattctttctgttgccaccacacgaggagggatatcctcgcttctctagtcctgtccttcatgctctggtcttcagtgcgagctgcacgccggatggtaagtctcgtccctcctatctgtttttcaggctctgattgtgaaagacagatgtcgcctcgatactttactatataatcttccggtattgacagccttcacatataacattccgagcaagtctcatcataagttcggcgaccagacggcgggctccccgtggtgtctgaaggaattttgcagacgatccaaaaaaagagcagagcaggtaattcacccattcgcgatcattgctgcggagaggatcaacttcgacgtgaagctgtccatcctcgtttttcactcccacaaggatatgacagtcccagttagagtcgtggcaacagatcctccggttcggcggagggtgcgcacaacaaaacaagtcgtcgtacctccgcacactgtcaagccaattgacgtatgaaccaaagaggcgctccaggatagcgaccatgtatgtcttcgtccccgaatacaacgcagcgacggaaaagcttcgcgacgccggcgggttctactcacatctggtcgacgggacgttctccaccatcttagcccgtaacgactcggatcatgagtacgtcctgcccagacacacttatgttggcgtggtggaacccacgactgtcctcaggcctttcgagtgcactcaaaacgcccatgagacagcagttgctcgagacgttggccgttcctccctctcggacaatgaaatgacccacatttgtcctcgagtagcctactccgaaccaagaatcaaggtcgagcaagacatgagccggcgcggccaataacaatgcggaccgcggcgcgggcactgggggcaacagtggttgaaattgaagtataattatgaaatgggatgggtgggcgggagtttttttacggggagtgtggtccatctatagggaaagtacccaacaacgaactgtcagacgactggaaggatgtcaaagccgtaatgtccgcactcgtcgccgcatctcaaacacttgttcgtcaccttcccaatagtcggtccaccagtcaaaatgaaaccccagatcgacaacacaggtcttcgggccaaagtttccttccttcatggccaatatcaaagcacctgtcgaagggaaaaactacacaggcttatggtcgtcgtgctgggggtgtggctaggtctgacttggttcggggtggtcgtcgcatgctttggagactctctggcaaccgtcacatgcaggttctcctggacttcgtggtctttatgactatctgggaggtcttccgcgaggagttccggtctcacaccccctctaccttcagcgaggctgtgcaccctctgctggtgtacctggggattcgctctcctcaccagactcgggggcagcgtctactccgcctgctaagacgttatggccttggcgtacgtagcgcgatgttcttgggtcgacgaatgcgtcattggctaatgacagcgaggtcctttgtaggagggctcacgctcccacgcgttcgtctgcctcggtcagtgcacacttctctggatagttgcgaagacgtttcagttgtcgaacgtggtctggtagagacacccctgtggctcgtcagtgctagtagtgccaagcacaccaagcacacacattccgtggggagggagatacatgtcctgccgaaacaacaaagccacttctgagcagtgtctcccggcgactgagcagatggagaaagtcatcaagaggatatgatccgacattgtgaatatcgaccggggactgcttttttaggtggtggaattactcaattgcctccctctttatatagtgagagagtcatcgcgccttctttgtcgtgtcgcctctctgaaccggcaacctggcggcaaaggcaaaatgaaaagaactctcgatgcggagggggtcgttgtataatttgttttcatattgctttcattaatgtaaacgagatccaatatacccaaaaagttgaggtggtcttcaggcttgtatcgtggatcttttcaggttttctatggccttataacagaaacttgaaaggtgagtctagtttctactactaactacgcctttagttcaaattggaaaagggaagttaagatgtgagaaaatctttgcggcagaggtatctataacttctattgatcctccgccttggggttgtacaacctacatctattgtccgtatctgggttatgttaatctcgatgagcttggtcttcttctcgtttaataccccatacagcattcaaaatgtataatatcatgtccatttaccaacatcgatagatacagggaatagaaggcaaataagaatcaagcataggaggatattcatatatacagtgtacaagacccaagtcgtagaatatatcacatcagacttgttcgacctccaatctcattggcagcctcaccattaggcatctcgccatttcggccggcgataaactcacggtaaattccctggagacgtctacgctctgcggggggaagagaaccacgcgtggtagccaatgagcgctcaacatgctcccaacggacgatgatatcctcacgtagctcgtctgtatcagactgagtgccattagccaccggggccgtggcattgttcgcgccagaagttccctgttcaacctggcgctggcggcgacgcgagttcttgattgcctccagtttggctgagatcactgctggaggaggcatggagacagacccggatgcttcctccgaagaggagtagaggaactggatgaaggacttgctagaagcattggcggacttggacttggcattgggcttggctgtgtcggtagagtggtcacccagcgcgtcgtggactgcctcgagatgggcgttgtacacgacagcctgcagatctgcaccagagaatccttcggtctgagtggcaatatcacctaggcgagacgtgacctcgtcactcatcttgagcttttcagccaccgagcggatgatatcaacacggtctgcatgattgggcatgtcacaaagcaaggacttgtcgagacggccaggacgaaggagggcaggatcgatcaagtcgggacgtgacgttgctgccagcacataaacgcccgaaaggccttctgcgccgtccatttgtgtcaacagctggttcaccacacgatccgtgacaccggtggagtcgtggccacgcttgggtgcgatactgtcaaactcatcgaagaagaggacgcaagggcgagcggcctgggctctctcgaacaaatcgcgaacactcttttcactagctccgatgtatttgttcaagatctcgggaccctttacactgatgaagttcaaaccacactcgccagccactgcgctggctaacattgtcttaccgcatccagggaatccatagagaagtaaaccagaccgcagtcgcaatgggcactgtgcgaagattggagcatactttgtaggatactgcaaagtttccaaaagcatcttgcgagtttcgaacagaccaccaacagaggaaaatgtggttgttgacgaggtaagagtaacgttgcggagagatgccggagtaaagtccttcaaggcactttcaaagtcctgtagcccgagagtgatcatctttgatgttgctgtgagatctgagacagagcgaatgagggcttcattgcgcgcacgagcaacgagaagcacaagatcaccaggcatatacccatcggttttgccggctagctctaggtactcgacatcccttccaataacaaacccatcacctccagaagagcttggtctgctccctggatttgaagggtctagccatgagtcttgtgttgaggagcttgtggccctcacgtgcccgtttgagctttctgtgggtttatcttcgctagtcagtttttccaaaactcttcggcgtccttccttgtcaggggctctcatattgatgatctcacggacgacgtggccgccgatgatgacattattgagggactctttggcctgggcagtggccagtagcacaacggaggaattcagcgcgcaatattcccgaaccatagagcagataacctcgctgttctggcgactgcgaccattgtctccacccacttgcaattcagtctccgccgggcaaagcttgtctagatcctcaaggattaccactgactggccaccaaggcgcgcacaccatgatgcggacatgaaaaggcggttcagggtctctttgatgttggaaatacgtgtttcatccgtgacgagcttgcgacaggagaagtacttgacattgaaaagatgatctcgtcttaaccggtgagccagtaaatgagtaagggctgttttaccagcaccaagtccaccggtaaccaatatagacgaggattttgttaggttgttcaatgactgttcaatcatggaatcaattcctaccaattgaggagcagtttctggaagagggtcctccataggtagcgccgacgaactagggtcaaatggcttggggatttcagcttgcacttcgagatttagcttagcttccgagcctagtaaccacccgaacattgcctttgtttcatccggagaccccttcagagggggatcgaagcgaagaatagcaccatcgaacgaagagacagaaggatgatactcggatttgggtataaccattccatcagtcaaaggccctgagaacagcccggtgtcggaaccagtgctgccgtagatgactttgaggcgctcggctagggcatcccgagatgccgtagtgtcagcaccaaacttcagtccgtccttcttcttcgaagcatcgcttatgaaaggatagattttgagggtcttgacagccgagcgatgcagcggtggggctgctgcttcgactcggagaattcctccaaccatgttctccgcgccaagggccgtgctcaacaaggtggaaatcgccgcatgccgattgtccggagcctcctcccatggaagcaatttggccacgagcttggttgtaggggcaccggaatcattggacttttgctgctcagcttgtgcaagttgctgttggggatccggtgggggtttgagaccggatggttggacaacggacacgcatgcccaagtcgctccgcgcagctcatggctagccagcaggtccggatcaacccaaatacggagaccctcatttgcatcgtcttctacttccccatcaaaatattgggtggtcgctgagcggtccacgcctctcaagtagagggagcctcgtgtgctggagtcggaccgaccactcttcgggcgtacagtgcttgaagcactcctgccaccagcactcttcctgctaccagtagcactgcggctgtcaccccgagagctcttgcttgtcttggatcgaactttgggggccactatgacttctgcatccggcgcgatcttggcgaacggggaggtgtctgatggagcgggcgtaagagaagtgacgacaatattggcggtagatgtgggggaaagatgcaatgcaagtgggtgcatatgcactgattgcgctgcattgtatgtaggattgggtagagcgcgaatctgtgacagaaggttaagttccaggaatgtggcgtggagttcaatgactagtcatgtcgagttagtgccatttcaattatagctgcttgtagtcttaacatactctcccagtcttctggtgtcaatggctcaatgtttatcgtatgtgcaacgggtggatcgaggtggatgaacaatccgacctgcaagtgttagcgccccacgtgggtaatgacgcacggggagtgttgtataccttctggccttcagtgagcccaagcagccgcccgaaagtagtgtcaagctcgacggtggatatctcctgttccctaggatatccactgttgataccgtctctcccaacgacaggcgcaagcctgcgcttgctcggcatacccgtccaaccgaggaagcatgattgctgcggcggagctccattggccttcccggaggtcgatttatattgtaattcaataataacgttctgagcggtctgacgtagctacacattagccggaaatagcccttgggaacggaacgactagtagactgaccgtgtttgcattgaccagcagagcgaccagcgacgccggtagattaacaagacagttcttgagcggggtgagggcaacttcggccgttgcggcaggcttcttgggcgccattttgaagctcagaacgatcgtgagcacaaagacaaaagaggaggggaaacgtgaactcggagagacacgaccccggactccacactatctctctctttcgcctcggcccgatgacaagtcatgtgacgacctgcctcgatagcggattaactaatactccgtcataattgatacctttcctaatctggttagttccatttttgagcgcgtcccaacctcgcgttcgcgttttaccagcgaatttggtaggggctcggatagtcactggaccctcttctctatttctctcccgatcccactattgattctttgcgctttcaattgagcgcactccgttattatgtctctccttcaatatcccccgcctgtggattattccgcgcaattgaatggcttcaaggatttcttgaaggggttcaagaccttccaatcgtcctcggaagccgctgcgaccgaggccttggaggatctgaacatcgacgatggccagactagtgatgaatatgatttcatggatgatgtcgatgagactaacggggcaaacgcccgaggagcaaggaggcaccgggagccaaagctcaagtacatgcaaattctgcaggatatcgcaaaccgggataaatctaatatcttgattgagttggatgacctgtcagttgtaagtatccaatatgaactcctctcgctaaattctagctcacaatggtggtaatagttcgagaagtccctgcccgagggagaagacctgaagctcgtcgaatctatcgaaaagaacacaaaacgctatatcgatgttatctctcaagcggtcgatgaggttatgcctagggagacaaaggatattacgtacgccaagtttatctctatgcgaatgcagcggctgctaaactaattgttgtgcagattcaaagatgatgtgcttgatgtgatcatgtctcagcgcgagaagcgaaatgagactatggaaaccgcaatggaggccgacatggaagctgctgcgactgccccatccatgttccctccggaactcacgcgtagatataccctcaacttcaagcccctcacaccttcggggtccagcgccgagcgcgattccaaagccctcgccgtccgtcatgtgcgaggtgagcacctgggcaccttgattacagtccgcggtatcaccacccgtgtctccgatgtcaagccggccgtacagatcaacgcctacacttgcgatcgctgtggttgcgaagtgttccagcccatcaccaccaagcaattcctccccttgagcgagtgtttgtcagaggaatgcaagaagaacaactcgaagggtcagctcttcctgtcaactcgtgcatcaaagtttgttcctttccaggaggtcaagatccaggaaatggccgaccaggtccccgtgggccatattcctcgcactctgactattcactgccacggcgctctcactcgccaactgaaccctggcgacgttattgacgtggcaggcatcttcctgcccactccctacactggtttccgggctattcgcgctggcctgctgactgacacatacttggaggcccagcacatcacccagcacaaaaagtcctacaatgacatgggtatggatagccgtactctccgcaagatcgagcagcaccagcgttccggcaatatgtatgagtacctttcacggtcgattgcacccgaaatctacggacaccttgatgtcaagaaggcattgctattgcttctgattggcggtgtcacgaaagagatgggtgatggcatgcacatccgtggagacatcaacatctgcttgatgggtgaccctggtgtggccaagtcgcagctgcttcgatacattaccaaggttgctcctcgtggtgtgtacaccaccggacgaggaagcagtggtgtcggtctcaccgccgcagtcatgagagatcccgtcacagacgagatggtgctggagggaggtgccctcgttcttgcagacaacggtatttgctgtattgatgagttcgacaagatggaggacgcggaccgaacagctattcacgaagtgatggaacagcagactatttccatctccaaggccggtatcacaactaccctcaacgcccgtacttccatcctggcagcagccaacccgctatatggtcgctacaaccctcgggtgtcacccgtggagaacattaacatccccgccgctttgctctctcgtttcgatgtcatgttcttgcttttagataccccgtcccgcgagggcgacgaggagctggctcaccacgtcacctacgtgcacatgcataacaagcacccggagaatgaagaagccggggtcatgttcactccccacgaggtccgtcagtatgttgccaaggcacgcacataccgtcctattgtgcccaccagcgtttctgactacatggttggtgcttatgtggccatgcgcaagcgacaaaagatcgatgagtccaagaagagacagttctcgcacgtctctccccgtactctgctcggcatcgttcgtctttcgcaggcacttgctcgtcttcgcttcgccgaggaggttattcgcgaggatgtcgatgaggctctgcgtctcattgagatcagtaaggcttctctgtacaatgatggcgagcagggcgccgacaacaccccatccagcaagatctacaatttgatccgcagcatgaaggagagcggtgccgctgctgttggagatggtgaagaaggcgagatgagcatgagacgtattcgtgagcgtgtgctggcccgaggcttcaccgaggataacctcaccatgactatcgatgaatatgctgagatgaacgtaagttttgataacccaagagggtcactgtactttcttactaacaacattatccatagctctggcaagtcactggcaacggcacgcgtctactcttcactgaagttgacggcgacatggacatgtaattgtggaagtctcccattatatttttctcttcttgaatgtcaatcgggctttttgcacgtgttgaagatgcatctgaaactgggtgaaattaaggcgatgggtgtttgggtgtattcttggggggaatggagtcggttcttatgatttcgtagggtcaattaagatcttcccaatctacttgtttaatctacatttacatcctcatcttccactaaagcaatatcaatcgagtgacacgtgtacacatgcaatccgtcagaatatctcgcgctatggatccaactcggtcctttgagcattgcactaccccccataccttgtctggagtctcccctctcttccccctgctaccagcaaacccactcctaccccggactgaaatactaagccgcgcactggtgctgaagcttgacctccttgcaaagatcggaaggagcagcatacggatcattacacggggtgttgcaagtcgtgtgctcaggaacgaaaacaaggaactcatagttcggcatcggcaggcggaactgattgtacacgtcgttgtcgtactgagacgccttgaagccggcacggcaggcgcagtggaaggatgttccggtgttgatgcatgaggttgagggatcacagccgttcttgcctgagataggattgcaggtgccgcactgggaccatggtgttgggttagcgaccaccagggaggcggtggcgacgatcaaggtgaggatggagaaatgcatcttggtggatgtttgggcttgagtatagacttggagtagatctgttggcttgtgtctggggattggtttctgatggcgttatcttctgctgggagattcgccatcttatatacccgtctccaagggcgtatatgcttatgtcaattcttaggctcggtacacctttgttgtggaagatgttcttcgcctggttccctgcattgcatcacgaggtcattttcagtctggtctgggttccccagtggtcggtgaaggaggcgatacccatatccggcaccagtgggagaacatccggggttgggctgtgaatacgaggtctggaacaatacctcagaacactaccaatccttgttgtccaacatgatgtcgatggcttgttagctcaacattgcctttgagcagcacacctaagactgttcaggtcttaaaataccgattcagcggaaggcggggtgtatgtctcagagctatgcctctagccacattcaggtctcgatgtgaatagccgtatagagatgcggggatttcgacttgccaaggcagatgtctcacactgcttgaagctttatggatacgagctgggtattctttgatctggtcagggttctgcaaatgacttctgcatggttttggaacatgacgaaaggcaggcgaaaacaaacgagacagcgaaagtttggacgttggttactcgagactgaggcaggggctgtggcactttgcttttggtttctatttactctacgggccatcaagggtaagggtctaaggtgcgcattcaggacacactttttgcattgccgctcaaaaacaatactccgagtctgataatcatattgcgttgtcagacgacctctattggctggtaatgttatattttcacctaatatcgacgatcgggaccggtctgaggcctgagtcaagcgtaagcaccgaaagacgaggttagaccatgctgatcggtgagttgtaagccgcgattcacatccatggatactatgagccgtttctttatctcaggtgaaatgccacaaaaagtgccctatgctaccatataaccacgtccagagtcagtgcagttgagattgcaatatcggagcggaacttttgtgcgtgagatgcagggttcgagaatcttccttttggtaactgtagaccgcttgtgtggaccatcgtaaagtggacgagacatgtttacatgttgacatgtttcattggcgtggctctaagtgcagctaggcttagatacatggaggtatgctctggtgtattgaaaagctgcattgtctttctggcgcatagattcatggctagtagcgtttgacacagtagcctagaggtgcgtcttagatccctctggttccccaattagcctcaagaacgccccgtgaacctcatcagtcaaatcgctggcctgcatgctccggcccttatccgcaaaggctcgtcgcgagcactctcgtgtaatgctacttgacgcccaagccgccagtagcagagtcgttaccggcgacatgcgcttgttctcagaactgagttctgcctggacatcttcaatactctgtgcctccttctcgttatcctgctcgccggagtcccacatcttctcatggtaagctgctcgccaagctaggaatgtgcccaatgatccagtcagtgtgtctccttgaccgccactgcgcttcaagccacccttgctatcagagatgatactggtaattccattggagatcacatcttgagggcccttttgaatgatggtcacgccgccaaaggcttgagacagctgctcacaggcatctgatgctttgtcggtgatgttgtcgtttccggcttgcgcaatctccacttggctggcgaccttgatgcccatcgttttggctagacggccaaactctaccacatttggcgtaaggatacattccttgtagcctttgactaggctcgggtcttgcgtcacaatcagcaatccgtctgcatctagcacaaatgggatcgatcgtgatcgggcctctctgattacttccgcaaccacctttagcgtcacttcgtcgcggccgagaccaggtccaatcacaagcgcgtggaggcgagatagcatggcgataatcggacccgccagtgatggtacatcaattgaattggggtccttgacagtgtcgatgcttggaagcaacggatgtaccatcaaatttggggagtagctcttgatgacctgtgcatgacatgattagagtgggttcaatataggccgggtgacagcttactgatgctgcggatcgctcgcagagtacgtgactctggtgattgttagtcgtttgcagaacgtatgtcattcttcgcacataccatatcacatcctgcagttcgagaattaatatattttggagagcatgggcctgtttgggtacgtaccaagtcttgcagaggccatggctgaaaagtatggagctccggtgtagcttttgccagttagtaggataccagtgtcactaagcagggaacatactctagggaacctccaataacagctacacggccaagctgtcctagactaatagttagcggggatgttgattgcatccacggtagatagcgtcgattacggagatcgacccgatgaacaaacctttgtggaacttttcaagcattggaggtacaatcttgcgcaccttgctaaagagtatctttgatgagactgagacatgatgaacggactccatgatgaatagttgggtatgtggaaacagtgaaacagtgaaattgtagaagataacttatgctggagggaagccctggaggtgagcgtgggtgatgtcacccgttaagtggggccaagcgtgtttggagttgcccgtcatatcaaagccgatgacttcaatatgaaattcttccgaaggtcaactacaatatacaacgatagtccaaaagaaaagaaagttggtattgaaatagcgctcgctattgtgcttcaaaacaaaaagaaaaagatgaaggtatccccgtctatggacaccccgaacgctcataatgcggagttaacatgtaggcctacccaaaaacaaaagagatcatgcaaaatagtcgaaagtagaaaagtagaaattcgacagtaataaaacgtccaaacttcaacgcttgcccttagaagcgagagcggccaatttccgctggcgctccaacttctctttcttagctgccatttctagtcgcagctctttctcatcctcccgcttggcatattccaatgcagcagcttcttcgcggtccacatcgtcaattccagcctccatatcggaagacgcatcggagtagtaatcgtcgtagccaccgtagtcaccctcatcttcttcgtcagttccgagatattcgttctgtcgagggttccgaggctgttgtcgacggtcacttccaccacgatttgacggcaggcccaaagttccacggtaagcaggaggctcgggggtctgagtcggtttggccgtgcccttgtacgatggcccctcagaatctcgctgccgggcagcaggcttgcccttcgcagaaacacccgatccaggcttctttcccagacgcgcttctttttctttggcctggagctccatcatacgccgcttgcgctccactttggtaagtctttccttggggccggcctgatgtcgtagcaagcctactccaacaggcgccgtctcttgcttagcctttgcctgcgccatgatctctgcaaacgatccctttggtggcggcttcgaggttgtagcagcggctgctgatgcgggtttgggagcgggctccttccgtgaggttgtcactttgggggccgcagacaagctggatttaggtgtggacttagacgtggtcggcctggagctggtcgggactggcttgggcacaactttcggtgatgctggtgatgccgctggtctcgtggcaagcgtagacttcattgaagctgagttattagtcaccttgctttcagatttcggtgggcgaggcagctgatcctcagctttgcgcttgattccactggcattcccactggtgggaggcgcccgccgctcatcggtcggttttcgatcctccttttttgggaccgaagcaggcgcaggcgaggtaggcgcctgagactgtgggagttgggacggctttcccgtctgaagagacgagagaacggaatcaaggaactatattatgtcagtcaaaacgaagtgaaaagaaagataggtagccatacactcattttggatgtagagatatcccgaagtgtgtaaagtcttagattggagagtggtacagagaagaagtcgctcaccgtcgatatttggtacgactaagtaacttcatgactccgaacccaatagcatgagaatagatctctggcttggctcgctccggattttctgttattccaatatgacagaactagcacaaaggacacgtatatatatgtatagagggatatatatatgtatccaagtaagaggtattactccgtagacgagacgagaaggcagacaggtttataggccagcatgcaattatcaaggccggatatgaaagagtcacgtgggaacaaacacactgcgccacagcgctcgcttagaagtcccgccggcactagccacacccactcgcaccaccttttttcaagattttgagcgctcggttaatccttcgtcaaccaacctcttccaccagaactcgacgttgcagtctccgcccaattcgcggttaaatcgattgtttctcttgttcagataataatcatcaacggtatgtgcacattgttttgttgcttctcagccgattttgcggcttaagaagtgcgatcgcatccgatcctgaattcgtgaagctaatgaaaattttgttccagtccattcaaaatgaagtacctcgccgcttacctgctcctcgcccttgccggcaacgagtccccctccgccgccgacatcaaggatgtcctctcctccgtcggcatcgacgctgagggtgaccgtctcgagaaggtcatcgctgagctccagggcaaggacctccaggaggttagtgacactcgcacgcgcacatatccgacatgaaccgcatgctgactctttatatagctgatcgctgagggctctaccaagctcgcttccgttccctccggtggtggtgctgccgccgcccctgccgctgccgctgccggtggtgccgaggctgccgctgaggagaagaaggaggagaaggtcgaggaggagtccgatgaggacatgggattcggtctcttcgattaagcggtttaatccaaggcctaaaaatcatggttctggggaacagatgtttggttggctcgtcagtccgggcaagatttgcgccggttggcttctcaagtgtgttcggttgagactgttttgatacagttgcgacttttcatgtgagctggaataagcttatagccaatacaactcgtctggccttcactacaacttttcgtatatgtacttcttgaaagatcgccgggacccgctcagcgtcttaagtaatagcgcgtagtcaaattctcttggagaactagatattcaatccacgtcatgctaacttggatgtacaacatactcagataagggccatcaggttctgatacgacatagccctgggacggcgatgggtaatcataatacaaataaatttcactgatgggtacaagacatttgatgacttccccaagcaaaggcgggtaaatcaagattaccaagaatttgattacgaaacaaaaaccaatgttcaaaatagattaccgattccccaaacgggtatagcgtctagggcttggaacctacccgtcgcttaacgagtgctgcccacctcctagagcctgtgtgttagcagcccgaccgctcagcgacacgacaatttccgacaacccatcttccttcgcttttcgagatacggtcgaaaggcggcttacaggaatatctgcaaaaatggctgacaccgaatacgtgagtttttttcgccctcgcccttcaagcccgtgcgatacactaacctggagttttcatatagaacgccgaggaggctgccggtacgttatgcagaatcaaacccacccctacccatcgcccctggacagaagaacgaatgagagaggagggcgcgcattacgattgaatatacgatgattattgaagagttgcacattggcggggaacgacatggacctgggatgcagggatacacgcacaacatgatcgcagacgctgactgaaccttcgccgaacagagatcaagaagagaagacagttccgcaagttttcttaccgcggcattgacctcgaccagtacgtttccattaccaatcatcgaacccttgggcatccattcgcagccagcgccttgtgagatgggattgaaggtggtcatctaccatggcaacaactattgtggacgcaccacatgtggcattttgtttcacgtctctttggcgctgcattgcgaatggacaccaaggaacaaaatttgcaacgacattggtctgactgaatccttttacaggctcctcgacctttcttccgagcagctccgtgatgtcgttcacgcccgtgcccgcagacgtttcaaccgcggtctgaagcgcaagcccatgggtctcatcaagaagctccgcaaggccaagcaggaggccaagcccaacgagaagcccgacctcgtcaagacccacctccgtgacatgatcgtcgtccccgagatgatcggttccgtcgtcggtatctactccggtaaggagttcaaccaggttgagatcaagcccgagatggttggtcactacctcgctgagttctccatctcttagtacgtactcccgagatttgttcccatgactatcaacatcagagcactaacaacctcccagcaagcccgtcaagcacggtcgtcccggtattggtgccacccactcttcccgtttcattcccctcaagtaaacgatttcaaacgattcccctcggagtggtgtgcggaggaaatggtgctgggaaagcaaaaatggaattcagcaaaactctcatctgggctctttttttcagcatgtatttccagtctgggtcagctgtttccaactcaatttaagatcttgtcggcatgaaatcatcttgggatctggatttagtccctcgtcgaatctggcgaggtaaaacgagatactctttcactcggcttgctgtgtcaccggggaaggagtctaaatcttaacgacacttgaaatttcattcccgtgcacatcgtaagcaagggcacactagaaagacccttaggcagccccgtcgcaaggtccctgggtctaggccacgaggttctacgtcgtattactgtgtgaactgctccacaaatgggacccccgctccctttactctgggggatcgtgttattcaatctattggcttggtttattgaactacgttgtgtttaaatgtggtattgaatataagctagcaaggactgacttcacatctccaggaaagcgtacttccttatgtcttctatttcccatcgctttccatggacaagatatatctcatgctacagatatatatttccagactggcctcttcccaaatgagttggctattccagatcattatgtctattgcactcactccgtcgaatctgttccatgccactatacaattacccgacttccaacattggaagcgttggaggtcgacggtattagattgcgaggtttcaggttggcatagcatcgtgatgccacatcccagttttacccaagtgcatttattagaccgtatatgccacatatcaaggtcatatttgaacaactctataactatatatttcctacttctacatgttgcctatcatccggcagtgcgtgtatatgcggaggtcgttgaattgccgagatcttcgagtgccgatctcaacgtcaattcggtatcctgcatgaaccccaacaaagcagataagtactcggactatgtagtgagcagtataagctttgatcgttcaatttaatgccgaaaagcccaagaacaagcagtttgaaatcggctctattgctcggcggtattgggccgaggcaagccgccagccgagaatgccgagaatgcggagaaagccccatctctttaaagtacttggttgctcgtgtgtttcctttcgtctttcgtatgtccctttgagcctctattcacattcgcattaccggctccatagctttgtttcgccgcaatgcccgtatcctctaactaccccctggtcgacatcccagaagtggatctttggacctttctatttgagcgcaaggacagagcttacccagatgacaagagtgagtgatatccaatgagaaacccctagtgctacgctattaaatacggcattgtatttctcttagttttctcaacactgacaccccaccagttatctaccaagatgccgatacccaacgtcattacacatacaaatcgctacgtgatgcctcgctagatttcggcaagggcctcaaagccctgtatgagtggcgcaagggcgatgtactggccctcttcacgccaaacagcatcgatacacccgtggtgatgtggggcacactttgggccggcggaaccatctcgcctgcaaacccgggttacacggttgacgagctggccttccagctcaagaactcccatgccaagggccttgtaacgcaagcctcggtgctgcccgttgcgcgggaagcggcgaagaaagttggcatgcctgaagaccgcattatcctgattggggaccagcgtgatcccgatgcgcgcgtcaagcatttcacctctgtgcgcaatatctctggtgctacccgctaccgcaagcagaagatcactcctgcgaaggatgtggcttttttggtttattcttctgggaccacgggtgtgcctaagggtgtcatgatatcgcatcggaacatcgttgccaatatcaggcagcagttcattgctgagggtgaaatgttaagctggaatggtggtcctgatggaaagggtgatcgggtcctggcatttttgccgttctatcatatctatggtatggatttcaattgcgcaggtgctcgaacaatattctaactagagcctttaggattgacttgcttaattacccaggctttatacaagggttatcacttgattgtcatgtccaaattcgacattgaaaagtggtgcgcccacgtgcagaactatcgctgctcgtttagttatatcgtccctcccgtggtgctattgttaggcaagcacccggtggtcgacaaatatgacctttcaagtctgcgcatgatgaactcaggcgctgcaccactcactcaagagctggtagaagcagtctactcccgcatcaaggttggcattaagcagggctacggactcagcgagaccagcccgactacacactcccaacggtgggaggactggcgcgaagccatgggttccgtcggccgcttgatgcctaatatgcaagccaagtacatgactatgcctgaggatgggtccgagcctaaggaggttggcgagggcgaggttggcgaattgtacctgaaaggacctaacgttttcctgggctatcacgagaacccagaggctaccaagggctgcctgtctgaggatgggtggttccagactggtgacgttggataccaggacgccaagggtaatttctacattaccgatcgtgtcaaggaacttatcaagtataagggcttccaggtgcctcctgctgagttggaagggtatctggttgacaacgatgctattgatgatgttgctgtcattggtattgagagtgagacacacggttccgaggttcctatggcttgtgtggttcgcagcgcgaagagcaagtcttccggaacaagcgagaaggatgaagcagcaaggattatcaaatggctggatagcaaggtcgcaagccacaagcgtctgcgcggtggcgtccactttgtggatgagatccccaagaatcccagtgggaagatcctacgtcggattctgaagcagaagttcaagggggcggccgaggcaccaaaagccaagctgtaaatgagaacttttagatatgcacgctatatacacttaagacctgtccatgttgatattgatattgatattcatgttttgttttcatttctgaaagatgtaagatccggaaagtatcctgtatctatatccaaccccaagctctttcagtaaataaacctagtggtctaagcccgaacaccaccaccctctaaggaaagaacctctgaaccataccctcaacatcctcaccaacaacggcatcaaccttctccctcgcgatcctctcaacagccgcctcaaccccctcctccccattaacaagatcaatccacccctccgtatcagccctaccaagtaacatatccgccacaatcgccacatcctcccgagtaacactcccccgacccttaggcgtgatccccagctcgaccttcctcgtcgcaggctggtcagtcagaagcccagggcgcagattaatagcctggaaagaccgcgtcggtccagactcccgcttccgctgcgcagcaagtgctgtcatgtactcatcggcttcttgcttggcttgagcgtacgtcggcagcacctccgtgttcgtcttcactatccccgcccattggtcgtcgggcatccagcttggctgcttgcgtcgactgcctaggtatgacaccatgaggaatttgcttacgcctggtgatgcgaaggatgctgtcatgaagtgtttcgctgcttcttggtcgattgcgattgtgcgtgctggtccgcctttgccgcccgcgcctgtgtttgcgtgttagtttggaggaattgtggattggggtttggatggattatagagctctatgtggttatttttttttcccctttcgactcatgtgcgcattccaatttgtgtgttgggatagtacaatgattttaagtaggtgcggggtgagtgaggggtgccataccagccgaccagacgacatagtctggcgtaaccgtgtcgatgattttttgagcgtctgaggcactcttcacgtcctctaaactcgagagtagcacattgagagtgcccttaaggcctttgcccagagctagaatctcgttttcgtgcgtggggttgcggatgacgctggttacgctccagccccggttgaggagcagcggagtaaggtggagggcaactttgccgtgaccgccgagtagaaggacatgcatttttggatacgattgtgacttgtgtttgtacgagagaaggtgttggagggttggttttaatgtgatcgaggaagcgaattcattgcgtcatcgaacggtgagcttggcgttgatttcaatgttgtagatatgaattgatatataaattgaatccacgagtcaattgtgctaatgtaaggtgtattttaagctaatattaggtagttgaataccattcaatttaatccatccatagatggctatataagtacaatgacgtccaagaaaaacaatgaactaccggcatatttaacctcatcatcccctagttcatccagccaaatttgccgttaagatagcccagtctctgcctgacgataccatgctgtttagtgatcactatttgatccccagcaatctagcaagaagcgacagaaggcacgttcttgcacttgctgctagccttaccgccagagatatcgtttccagaccaggtccagtcagagcagctaccgtcgccgcagagaatgaagacgggagtagccttgctctcaacactgccggtaaccttctcgacagtcagaccggtaatggggacaccggtggtgggagttccggtagggctaccgttctcgtaatcctgctcgatgacgataccgtacttggcgatgttggacagctcgatgttggagaaggtcacgtcagagacgtcaccggtggccttgtagatggtcttaatgcggacgccgttgtcagagttggtcacggtggagtcggagatggtcacgttcttcacgatgttgttgtcgcgcaagccaacggatccgatggagagaccgtggccgccggagcagtagccgccggtgaacacaatgttctaatggacagccgggttagtttggttgtggtagaagtattctttgactgcttacctcgccagagttgacagccaggcagtcgtcctggttcttgatgttggcgttgctgatggtgatgtaggtactctcgccaacgtcgaaggcatcggtgttgtggccgcccttggtatcaccgtcggagttgtcgatggtgatgtggtcgaggaccaggttgtcggcctgtacgctgaaagcctgcacgggtgtgttcttgacgttcaggccggtgatggaagagtccttcagcttgtgggcgtagaagaacttgggcttgtccttgccgccgttggttcccttggtgtcccaccatctggctccgtcaccgttgatgagatgacccttctcgccggagacttcaatgttcgagccttcaacgcggatgaggggacccttccactccttgtatccgaaggtagtttcaccccggaagatgacctatacagcagctattaaatcttcggttcttgccgttcttatcagggaatatctaccttggtgccgtcctgcagcttggaaaggtcgagagtctcgccggcagggaccttgatgttgtccagcacaatggtggaacaggccttcttgctggcgctggcgctggccgccgaggtaaaagtacaggtggaggatccgcgctcgaccagctcggaagcacgagaaggagctggggcagccgacacagcggcggcgccgagggccagcatggaaaggaaggatgtacgcatattgaagtaaatatccggtcaacagacaagtacggagtagaaagagagtatgttccgggctagccgatttgagtgcagaaggaaatgaggaaagaaagaatggatgggtttgaataagctattccatcgggtttggccttgatatttaaatgcttggcctgcacggtatcctccttctagcccctgcgctagtatctttatgaaacgggtccatcgccatctaccatgttggcccctaatctcactcggatcatttgggaagtcatggggtccaggggtgcatggtaattgtgaagtgctctactccattagattaatccattagggttaactacacccgacttggcaagttctccgaaacatttagctccaccgaatctagaccccagttgaaacgaccgttattgctggaataattaattctcgctatatctccgggtaaacggaacgagacagaatggttgaataattggttacagtctgggcgaactggtcatgatccaattaggacacggaatagatatcttcaggactatattacgcccatgggaagccatgtggagctccgtcaagcttgtgtttcacgccaagcatttaatttgacgagtttctcgatttgccccgtagggctggctcaatgctcctgaaggagatggagtcccaacatattgtggcgctgaaacaatagtccccctctttcatttatacggtcttttgtttgattggtgccctatttaaatatgcacaaatgagccaaaagtgcattataaatcaacttaggaggcacaaatatactccgtatgtatctgcctagttcctagttacccctgacctgggcgtgtaagcatgcaccttctattcaagcacaccggatcttggttacagatagaaacgtcctttttgttgagcgcgatgagatggcaatgcgatggtcgaactactccttccgagctaatttagtagactcgaagaaccaggttgtcaaacaatataggccacgcccatagtggctcgatctgttttatctaactcaagtttgtgatgtatgtcaatggatattctttaccacttgtactattttctttcgatgtatttcctctcctggaccaagactggaatggattcccacgcggcaaacctttccaacatggtctctgagatatcaggccaggaactgcatagaaactacaaccaatcactttctgcttatcgggtatcggttatttcacgaccagtggtcgcaataggctcatcctgttcccgagcacatgctctgatccagaaatgtacaattaagaatggttgagaaatgctcagacgagagtcgtaggaccttaactgatacgaagggacgttttggaaaggactgatgtacgagtttcaacgagaactaagacttcatgatgaatggtattggaatgaattgcaaatacaaagaggaccccatcttatcccgaccgggacaggatcctggacacagcaaactctcaatactatgtcgagaattctatgaggttcggttgagggaacttcatcggctagggtggctgtctccatacacataacaaatagcaaagaactggaggaaaaccattgtcttaggatcagggcttgggatagtgacggggaagggatcattggatcataactcatcgagaggaaggggatccggtaaaggtttctaggccttgacttcggctaccagctctggatagtccgcaatcaggtcctcgtactgagtgattcgagtgcggagactccgtacttcattgattaacaaccgattggcaaaagcaaccgaattgacgactgacatgacattcgtgattcgagccctggccttattatagccttaggaacagggccaaccgatccacgccaagacgggaatagccgcatacccgaactataaggcactcaaagcctcccgaggtcttcttactccttccttccctcaccttcatccatatctggccgtatatcatcgatcaaaatgcagacggccggtcaagttcttggtcagtcttttttgatgcctcttttgatgcctcttttgatattctgactagcacagcctgaaaaacccgattgtcgaggttggcctccaatgtatgaaatgcgaatagcatatgtgatagaaacctgtatgcttagagaataggacattaattcttgccaagttcaaatttaggggaaggcgttcttgtatcttgtacctcttcatccctaaatcgtgctcgtcacgatgatgtgttcagctgtcaagatcctgtcgctgcctgaatggtcagcctagtaatgctaaggttgtttgcctgttgatagtgtagctgtagatagctctctctctctccctcagttccctcgtcagctggcaatactgatcgtcttgactgcgctttctcttgctcttgtgctctcctcgccgatatctatcttcaccctttctgtcaggtcgtagcgtcggcccatctcagaatttctgcaagatgcctgccagtcgccatcattcttttactttggttgtattttgtggcggtatccttgacgcttctctggccactgattttgtcatggtctcaaaaaagttcatggctgatggactcgaccctacctgtctatccggcacacatctccgcctcatcaccgatacgacaggtcccttcttatttggccgtgatgacctggggccgcggtcccagatctacgatagctccgaggctgcaaatccgttttaccacatcgccgggccaggcggtttgaagcgcgagatactcaactgggtccgcaatgtctctactcgcgtggccactggcgaccgagtcatcatcattttcatggcgcatggcctcgacggatcgcgtattattctcaagtctcagatcggcaccgagtatcttactcgagcggaagtcaccacggcactcgcgaccttgccccagggcattcgggttctccttgttaatgaggcttgctactctgggtcatgggcaacgatcgctgcagatactggctctggccgtgacgttgtggtcgagactgccgcatcaattggggaacaatcgtataactaccgctccgcatccggcagataccgctgctccttgttcgcagcagcgttcatcgaagagctgacaacccatcccgagggccgcattgaccggcactacaccaggataagggaagagatgagacacgtctcacccaaccaggacagctgcacccctttattggtcccatccagcagaagtctgtggtctcacaacatatcccacttcgtcctgactccaaatatcgcaaccgctatcgcgaacctaccatcggacgagagccgccatcaattgcttctccaatcgcgctcccgggcgcggacattctgggccagacaccgatctattcgatccccagggcaggggcatgccaacgacgcatcagagggttccgatatggagcttgggcttatctatagctacctcgatgaacttggcagcgcagcagcaggccaaaatcgctgcacactagcgactgcgtgtcatcttgttatcgatggccgtgtcggagaggagatgaaacaccgcattgtcaacaccattgcgtggcaggatacccaaatgttacgggtctgtgaactggtatcccttctcgttgatgaagcgctgatatcaccgccacttgatcaaagggcttgcagtgagttggccaagaaggactacgaagctagggaggggttggcatcaagggtccataatatccccggggttaaagagatggcgatcccgccgttccatgacgatcgttacatcgatatcgtctttgacgatgcctatggaatgttggtcgatgccgtctattgtgagcaggtcttgaaccccatggccttcgacataggtaaaatcgaggccactattgctgccttccttcaacgatccccagccgtctgaccggcctggatttgacatggacctatcgtcagatagcttactttctattgcgaatcaaaagatttgttctctatagttacagacttggcctaagtttacggggactttggccttcgtacgaagctctacagtgatgctcgttgttatctcgttgcttgatttctcatcgcacgcgtgactcacctatgtattgccttcttccttgatcaatccttgttgtacctatgatatcatcgtaaatcaccacaatttgatcgcaactgtaacaaaatcgtgtattcttgattgctgagcgtcattaaagctcccatcccataaggggatcccgtatcacgtgaccgttttcttctattattcttctactaatggctgcagaaaatcactttaatttctggtagttcatttgaataagtccaataatggtccccagaaaataaaggtaagatggtgagggcctcaaattttaatattagctttctcatggtagataaacgagagaaacgcaatgcgacgggattgttaaagcctccaaaatcccaaacacatctaaattcgagcaatggtagaactattggtatctatccagaaaatacatatgtatctacactacataggtaggtatgcagttacggtatgctgtaaacaagtaaagcgtggccccatatgctgctggaaattggaattgccgaggtcgggcttctccgcgcctactcccccatccccggactttcatctggtcttgctctcatgctctaatttggcatcaacaacaacccaatcatgtctgcggacaaccctccagttggggatgcgctgggccttccgccgcccgccttgcgcgatgtcctccgcgtttgtctcagcgcgaaagaataccgattcctacacgaatcagtgatcaaacgcgcccctgccgtccaaaacaagttcccatcgccatctcgctacgatgtaatcgcccgtccgaagaatcgacacagtgaagccgctattcgttcatccctgcgagtctttgttggctccggaatcgcgttgaagttggcggatctgttgattagtcggttccaaggcgctccacagtaagatcaatttaatctacgaaaagagtcgtcaggaatatccgctaatgctggctctatcaacaggaaaaagacccaaacttccctcctccggtctcccaaattccgtctctctatttccctatccctcctccttttcatccatcgcctcctctaccgcttcctcatccgactgcgagccaaccttcgcaccgacgatgcaaaaccattcagagagcgcaacccgcagatttcgcgcgttttgacctcgcgctttgcaccagcgatcggcgcaagtctggcgggattcgccctgggcatctgcccgcaggaccaactccgactgactgcggcgatttacacaggcaccaggagcttggagttcttgtttaatgtcctagactcaaaaggctggttggataagcgcccgtggtggttcggcagctggctgttgatgcccgtctcatttgcgcagctcttccatgcctttgtgtttgatcgcgagactacgcctaatgttcgtggtcgcgaatctttttggttgaactacggtcgctaatttgatgctacagtggtttggaaatgtcattctcaagctctcgcccagctatatccaaggccgaccggagtcgctcccggtcaacgtcgcctggcccgagaaggaagagattgtgaactctcttgcctccattgctgatctccgctggccgtatgtttgaacctgagtgtttaagagtatagcggtcgctaatatgacatagggcattcgtttctccaattctacatccaggcgaccccaacaccttaccgtcttcagtggcttctatctccccaattactggaccagcacaccctgcaatctcaagtctgtcatgcgccctcttgcactcaaacctcccaaactgtagcacggcattcttgcatcacatacttctctcagtgccgccacttgcgcggttcctcacgaccgtcactttggcgatttcaatccccaagtttaagagcattctgctccatcctatgtcatcagtgaacagcatctcgaagcgcattatcaccatgactgcagttctctccgccgctattggctcagcctggggtagtgtctgtttcctgaacaacaacttgcctcgaacaacgcttcctaccaagcggttcttcctcagtggagcactgggcggtctgccatttttgttcctgggcaacagccgcagcacattcctttggttcttccgggccgctgttgattcagcgtacaagaccggggtcaagcgtggactatggaagggccgaaagggcggtgagttgctgctgtttgttctatcctgggcgcttatggggtcgatccttgaagggaatcctgaggccgtgcggggtgctggactgcgtaaagctcttgcttggttgagaggtgatggatttggggatccagtggatattgcgaaacgcaaactgcgacgggaatcgaagaaacccgacggaatttgaattaaccagatgatagtctgatatgatattttaggagacttccaaggttgtcggtgtggaattcactttccggccccacgtttgcggagatgatcttcggagactggcctccgcatttactccgcatttcctttcgtataacttggagctcccagcagcaattccccctttaaattagcaattgagttttaattttcgttgttatccttatatacattatttcttttcacaatgtctgcccaaaaattgaagattggttgtgctggtctaggccgtatgggcaagcgccatgccctgaacttcctgcagcgtactccccgagctgaacttgtggctgccagctcgcccgatcccgccgagctcgaatgggccaagattcacctcgaaccctttggcgtgaccctgtatcagaactacgatgacatgctcaagcatgaaggtctggttgccgttgtggttgcatcggcaactatagtgcatgccgagcaagcaatcaaggcaattgaagctggcaagcacactctttgcgagaagcctctctctactagccctgaagtggtaagttggtcgtattttgaatctacaaccccaattcagtctagtccgccaaatacgaagaaccaaacattgaaaccatgaactgacattccacctctcatacagtcccaaaaagtcgttgacgcagcaaagaagaacccacaccttaaagtgatgtgcggtttctcccgccgcttcgacagctcctaccgagacgcctacaagaagatgcaatcaggagcaatcggcactgcatccgtcctccgcagtcaaacctgcgacaagctcgaccccagcggcttcttcgtcgcgtacgcagagttctccggcggcatcttcgtcgactgctccatccacgacatcgacctgaccctctggttcttcggcgacggatgtaaagtgaagtccgtttcggcagtaggcatcacagccgtcgagcccgatctgcgcaagcacaacgaccgcgacaacgccgtcggcctggtcgagttctacgacggccgcatggcctacttctatgcttcccgcatgatggccgctggtcaggaggacaccactgagattattggcaccaagggcaagctggctgttaacacccagcctgcgttgaaccacgtcaacatctttgacgagtccggcatcagaagggagatcccccagaactactacgatcgctttgagtatgcgttcgttaccgaggctaatgagttctcggctgcttgtcttgataacacggcgctgcctattgatcttgagaacgctgttaaggctgttcggattggtgctgcgctgcaggagtcgttgattaccgggaagaagatcttctttgacgaggctgggaaccggtccgagttggctcgtttgtagatatgtgatttgtcttgtgttttaaaaatatacaccatatatacatgcattgctttatagatacgctttgaaattaaactggtttatgacttccaatatgatgtagtcttgtctggtttaaagtagacctgacccatctaactaaatatggcgacgtcaaaaggatattggttgggacttcatcatacgcacgcatataagcggcctacctttccaaggttacaaagtaaactgttagtgttggatcatcccatcatccatagatggatgccctatttcttagccagactgagcgctcgcttgtttcttttttgctggttggtggccttataaaagcttcccttcatagatcgaatagagaagactcctcttgattctccccagtagtcagttgttgtgcagcctcaacagttagtgacactttataccattcatagtatttataccatttaattcaaatactctagatgtcattcaggtacttggaagggctaataactttcgtctatatcgatctgatttctggattcgattgcctagaacgggtggaaagtatgatttataacgctaattgaaagagatggcatatatcgtgcctacttccatggagctggaaggaaaacggggaatcatgaaagaactcgtatagaataaagacgcataaagaccaaatcgcagacatctaccacttcaggaccttggtggggaagtactcatcgatgagctccaggtagtagggctaaaaatgaaacaagtcagcctcgagttcataaatcatcagcggaagcaaaacataccttcaactcctcaacactgggaattccatcactcttgctgtacaagtcataaggattgaaagccttgacagcacgcaacatttcacggtcgtggtcattcatcaactcgtggtatgcaccggcgctgtgccaagggtagaaagagtggtagcggatcatagcgagcgcctcatcaggaagggtcgactgctccttagcgaggtggtagagatattcatcatggccccaggagagcatgaccttatcgagaccgcagccgggggtgtagataccgaacttagtatcgtaaatcttgtggccgtagtcttcgttatcgcggaacgagtcgcggccgtagacgatcttctcgtcgaaggcacagccaacggggaacgtgtcgccgacaacgtcccattggccttcggcatcgaagaagaagagcagcttgccgaggtcgtggattagaccggtcagctgcatccagcggggcttgccgtcgcggcgaatggcctcggcagattggagaaggtgctcgatctgggagaggctggtgtcggggtccgactcgtcgatcaaggtgttgagcttctccatggcttcccagacggtcatttcggcgcgcgtcttgctgtggaagtcgtggcgggccttcaggttgtaggcgacggtctgcttggtgtgctgttccttgtagaagttcttgacgcggtcgctggcgtcttcgtactggcggaagttggtcttgtctttctccttgtcgaactcggactgctcgtacagacccttctcttcggcctctttcttctcggcctcgcgcttcttcatgtccttgagaacgttgatctcatcaatagcgtcggagagctcttcgagcgcctggccgtcccgcttcttgaagactggggaggcctgtggggagacagcgactggtgccattttgactgtctggaagaatgtattgtttgatttttatatataagattgatgcttaagatttgccaaatgggattgcaatcaacaaatcagtaaggtctggggttgaaagagagatagatcttcggatgtcgagcgtatatatagggtcaaggcctggaaaatctagtatagggaatgtcgcgtgtagatttccgatatcagcggttgtgcgaggatttcccccatattcatttgcctggttttccatgacatcgattgtacttcttcgtgggacgaaaaattgaaacatcacggattctggcttccgcgccgatgaagatctggcttgctctccaaaaggaggacgatgattggcacatcccacgaccccaagccaaccaagcggagtggctgtgatgtcaagtgggggggaggggggaacctcttcgatctggaagacggtttccgctgatttggtggtttatcttttggacttctgatctgattttgatctgacggttattgtgtggtgatgttcgatcctttttgagatggaaatggagacgatttactccccaagggaatattccagaaaacatcgacatcccagaagacgatgaggtgattgatggaaaaatgcttccttggccccttggaacggaataaccttggaacgatagccgcgtgggggtttgttatatttgtttatactttagtaaaccccccgcctttcttcccatttcaacttcgatctgtttactttccttattctttcctgtatataatcttccttgtctcttgataccctataaattcacaatggctgcctgcgacacccgtttcaagctcaacaccggcgcggagatccccgcacttggcttgggaacatggcaatcccagcctggcgaggttgcgcgcgctgtgtcccacgccatcaaggtgggctaccgtcacattgatgccgctctttgctacggcaatgagaacgaagtcggccaaggtatcaaggaggccattgacgccggcattgtcaagcgcgaggatctcttcgtgaccacaaagctgtggtgctcctaccacgcccgtgttgaggagggcctccagcagagtctgacagacctcggactcgactatgttgacctatatctgatgcactggcctttggcaatgaaccccaagggtgagttaggtttcttcagatatgcagattcgaggtgctgaccactaccaacgcaggcaaccacaacctcttccctaagctcgccgatggatcgcgggacattgtccacagccactcccacgttactacatggaagagtatggagaagctcgttggcaccggcaaggtcaaggccatcggtgtgtccaactacagcgtcaagttcctcgaggaactcctgccccaggccactattatccccgctgccaaccagatcgagaaccaccccttgctcccccagcaggagattgtcgatttctgcaacaaggccggcatccacatcaccgcttacagcccactgggcagcactggtagcccgctgttcactgccgagcccatcgtggctgtcgccaacaagcgcggagttactccggctactgttctgcttagctggcacagtaagtaccattcaaggtctgcaccgtaccccgattaaagcatgctaacaaattggtttctagtcgcccgtgggtcttcagtcctggccaagtccgtcacccctgcccgcatcgaggccaaccgtgccgacttgatccacttggatgctgaggatctcgctacccttcgcaagtacagcgatgacctccaggccgagggcaagctccagcgctttgtctaccctccattcggtgtcaacttcggcttccctgataagcagtaagctttcttcgtgcctgaaagaatgatcgataggctttcctacatgtatagaaaggaccggtgccttttcgttttatgacatagataccaaaatggaagatttatgatttcatgaataacactggatactcgaactatggagcggctatgcttatatcacttattacttgaagttccctggctcgtggatatctttttatcccccaagctgcctaaccccactatatagctaagtccatctgccactccgtagattagatctagcccagtaatgaagcaaactttcatactccacaaatggattgatgagacctttggtgatctcttccgaggaaagagggaatggggttgcgtaaccaagctgcgcctggatcctgcaatatcttgcagggacgtcctgaacaaggtatcatgaaatgattctttgactgctggctcggctggggaaaggtccatggcgaggaccaaccgctgcattttggtcattgttgctcttgggccgcgatgcgcgagggggaaggggccattttgaacatctcaaaacaagaggaaaagaaaatacaagagacgatgggactatttgccgacccacgctagtttggctttcttatcagaccaaatttggcctgagggcaacttcgatgagaggcttagtgaatcttcaatgtgaagagccacacagcggtaaggaatgaagcagaggaagaaaagacacaaaaggacacttgtggctttgcaattgcagaatggctttggataggaactgagtgtgaagtaggaaagagaaaaagaagatgaaagaatgaaagacaagagacaagtaaagtgaggagtgagagactgaggagctggagatcagaagtgacaacaataaagacactccaatttgagacagagcttgtgctatgcttgctgctattgatattataactgttgcctaacgtcgcaatggcgagcatactctgttttgcaccgggtaccacgaatttggaagtcacgatagggaaaagcgggagcaacttagctacacgtgtatttgccttctatgaaaggtatggataatgtctcacagcctgctataatgactgaatggacatatgtattggtgtttttctctgaataatgagattaacatttgagggcttcgaagtcacgtgtgacaaccacgaggtgtatcatttggtcattgagagataattccaggcaaggtaaagagaagaatatatcaatgtatcatgaatgagacagattagtccgaccaaatgagacacgcctgggcatagtgtaagactacagtaagcgttgaactccctgtggcactgtggtctatgctggggaaggatgagaggatgaaattgtgtctgaacatgatactggagatctagtcgcaatactacaaactgaaaaaacttgcaagacaggcctcgcttgagagacattacacatttacatgtgcaaaagaaggcttgagttgtgggtgagtcccaccaatgtttgaatgttcaaattccaatgttaatgatagtggcagaaatatctgtgcacacggtattcaaccccgggtggtctagttggtagattgctaggaaactatatttgtctgttcctgacaccttccaagccatctatgcggcgttgaatctcacccaccgtaaatcgtcgtcgagatgaacaggctaggaataacatcgagtcatacctgacgttcaacgaaattcagacttagcggcacaagtcagtcacgcagcaagctttattctttatgccgggtacccgaaatcatgctatctgtgaggttgcttgctacctttcaagtacgtaatgagttatcgtatccacggacatgaaatggcttgagatgaagtcggctgaacgcggacgtccatagaggaaggaccatgggctgccgtttggcgggtcatgtgtctcactatccaccgaaagccttcggatcagataaagcgccacagtacgctaaaggaacccagaccagcagctgaatctaatcagatgatcagagaaattatcagattcgacgccattcggaacttttcacccgaggagcatccggctgggcgtaagcatgcggccatacccaccaagcaacatggtagaagctcggcttgtttttccacagggggaaatgttgccggagatcaccctgagcccagctaacgttactattgcggagtattgttttgctaattgaatcgatgtggatcgaaattctcaaccatgtgtggacagggcagtttgaactgagagggaatgggtctctcggtgacatgcaaaaataggaaaggcgcacgtggaaaagaaaagttatcagatccttttggtcagttccacctgagagtggataggctctacctattcatacgtggatctgtaagacagcaggctctgtatgctgccaaattaggtaggtccagagcatatgattgttttggatatgtattgctcaagtgttctagaattcatcaaagcgaatggaggtcgtatttgtctcatactcggatacatagattactcgtatcccgggatatcgttgtaacttacaatatattacataccataccggtatacataagggaaacgaacatgaagcgagctgtaggtcgctggaaactcggcgtgggcccctgcaattcttgacatcgagagcagtacggagtgagtatccttataccccgtaaaggtgtgattatttcggaagttgcacgcttggcatagccttccacggctagtatgattaatatgtgtcaaagctcccgaggtcattgccaaggaggctctacagattgtgagaacagaatagtgggttcggatggtcataacattccacgttcagatcgtatgtgaatatgattaaatataagatacaaagagtaaagccatggtggctagttgggttttgcatataataggaaaaggatcatcaacagtgtcgtcgaaaatttatctccaaagacgaacgcaaacaccttagaagacagtacccttgacctgagcgaccttcttcaggtcgatatcccggatcatgagggtccagaagatgcacagacccataaggccggtgccaacagcaagcattcttgtctgtgaataggcataagcttcctgaatagcgagtctcgctgcagatccgacagggtagaacagctgctgggaaagatcctcgtaaatcagatcgaggtctcccatcacattctctggaagcctcgtggcaagggctttgtagaatgtgttggtccaaattgcggcgcaaatggtggaaccagcagcattaccgacagtacccacgacgtttagcagagcaagaacagttgcgacgtgctggtggtcggcggcggccaggatggcaagctgctcaacaatgatgaaaacagatccaccaatagagatgaaaatctgacacatcacaagataaccaacagattggttaggacggcggaagtaaatcatcaatccctgagcaaagatgtacagcgggaccgcaatgtagagagtccacttgaagcgaccagtcctgcgaatgacgaaaccgactccgagcaaaaggaagccggataccacgtcgaaagtgttgctaacgtaaccagcctcagagatactgaggtcattgactacttgcaaaaaggatgtgtagtagttgttccagcagtagtaagagagctggtatgtcgcgtcgagcaagcatgcaccgatgacagttcggtcggtcaaaagactgaagtcgaacataggggtaggagcaaagcggaactcccaaacaaggaaaacgccaagcataacaaatccgagcacgatcatggcaatgatgtagcctgatgcccagccgttaggagcataagtggaaatactgaatggaaggaggaagattgtaaggccgatggagaacacgaaaacaccgaacactatgcaagtcagtattctgccaaagtcgtatgctttgagaagttcttcacttacaatcgaattccttggtatagaaccaaacattttgcaagaaagtccggccgctagactccttgactataagaccgttctgtctggccttcttaaggttgctcttcaagatgaagtaaagaggggaggcaacaatggggaagatgatggagaacgcgccaaaggcccatcgccagctaatatcttcgtagaagccctccgcagccttgggaccagcgaaagctgtgatgatgtatggcgaggaggtgaaagcgtaagccaaacctcgattcttcagcttggaaatatcggcggtgatgacatcaacgcagtatgtcatacctccaaatccaatgctgtagaagacgtaggcagcgcagaacgtgggaaggttgtggcacacagccatgagaaccagaccgagtgtagcgaaaacggtcattgccaaaaagccttctgcacggccccaaacgtccataaccttggcagtggggatgtatactgcggcagtcattgcgtctgcgacaatgtagataacattcaggagggagtgactctcaaagccactggtgacatagctgagcaaactgtaattaatcgaggattgcatagcattgacgaagtacaagaaccagatgctgttgaagattcgtgtcagtaaacaagccggcttgcacggatcgtatcgcccgtggagctaacaagatagaagcttactttgcaaagaccgcaatcagcatggtcttcgtccagctcaaagtcacaccctcgacatctctgacaccttgctgtacatcttcggtgggaacttcagggttttcactattggctacagcaacagtctctgtgggaatttcactcttttgttcgccatcagtgctgacagcgacttgagtaacagactcatgggtcgatgatcgccggaaggcagatcggaacctggaaatacccatatcgtcgatctggagatcaggaaatataaaaaataggttgggggaactcaaaacgatcgcagagcccaagggaagtccctgcccttatagtaaacgtatctgcgagatccagcgcttaaaaagaaaaagacaccgaactcggcagattggtacaatcttagaagtctaatgcactccacgccgtaaaaaaacaaaccaggagaaaaggtcttggcgatttcttagcgttcataatcaagtaaccgatgtttttctcttctccatagggcttctttgtacaggccatgtgtggtcactccacttgaggcttcggccagaatgagacattgcggaggcaaaatcaaaatctaatcagattgcgtgtacggagtatgatggatctcgtaccggagagatgtagcgaaggcaatgttaaccggtgatgggaccgcttcaagctccaaataatagctcgcgaaggcttcctgttgaggtaattagtacgtgaggcgagcttggcaagcttggcactataatggactcgacaaaaaagaaataagaaaaagcacatattaatgaatggcaatgggtcaatgtgtttgggcgtcgtgggccagcaataagagctgctaaacgcgagatccgtgtggattcacccgactgtgcagtacatcgtatgatattatattgtacatactctttaagtactagcggtatgtaacaatatggtattatacggattccaatgaaacatgaggtttcttaggttagtggcaggtttctgcaggtatgaaaacgtatccgattatttcgctacatattttagtaggtgcatacatatgtatcccctttgctttaaagtgcttacgacatggattctgtcttgtatctaaaacatttcaacccaaaatacacatgtacatgtgtattatttacgccgtgtatagcaataatcagataagtacatgccccactataaaccatggaaccgctaaatgacaattttttcggggtgggtccggctctagggcgtggagctagtcccaactaggaattttctttttttcgaattcattgtggagtactgatgttactgttggtgtggacctacaacatccccatctgacagtggaaactacttgcgccaccaaatctgattacggtatagtacggagtaatgtgcgtggacttttccctctcacagttttgaattcttccagcttggtgaccgtttctccacaaaagcctggatgccttcggcaaagttaggaccaccgaccaaccgaggataccactggtccgccaaatccgagacagtgtcctccacactgccagcttcccagctcattcgaacacccaaacggccgacaataagggaatcggggctatttttgcacatgatttcagccactccaactgctgctcggacaacatcggctggcggatccacaacttgactgataaggccccagtcatgtagtgtggtggcgctcacgttcctgcctgtaagcaccagatccatggtgcgttgcaggccaatggtgcgggtcaatcgcggtagacaccctgctactgggacaatgcctcgcttcacttccggaagggagaaaatggccgctgatgaagctaagataatatcgcaattcgccaccatctcgaaacctccgcccatgcaaatgccgtttacagcggcgatgatcggtttcttgccggtccggcgaggcaatccggctagacccggcgcagacatgtcattgacgacaccagcttcgttcattgcgttccattctgtccaattcagagtcagtgtttgccatcgacgtctttgttaatagaagagaagaaatctacctcctagatcagcccctgtacagaaggctcgcccgacaccggtgatgatggcgacccataagctttcatcttcatcaaatagctcccagatcttggcaatctctcgacttgtagttttgtcgatacaatttagctttttcggtctattgattgtgacctggacaacccgctcatgcggaaaagagatatagaaattctcatgattcaagggtcctgatcgtaaagacatgatgaattggttaaacggaatatgcgcggtaaatgttactaattcaaccgcaggcttcgactttatatttcctcttgggccgggttacggattatgtattgtcattcatagggaagctcggttgaagaaagcttccacggtacctcgggacttaactccataacaagcaggcgaccatcggtattctccccgttttgaaaataacagccccatagggcggttcgcgtatccccgaaaccaaaattctaccaaaattctgttttgggacaatgtcgttacatatgttgtgaggaatccttctgcctcggttactatctcctttcttgaacatacttagccgttttacggtctcacctacatataatctgatcgtgcagggcggggagctctttttttcttaccccagaactccaattccttcaaaattcttggttctacccttgagaaatatactacaatggcctcgaaggcacaccagtatccgtcggtcaagctaccacacccttatctgaccgcataccgcgtgaacactgtcgctggatcgacaccggctaagcacaacttaacacttgaagagcagcccgcaaagggtcggtccttgcctgaacagctacactcagactcgctttcatggcttgacttgacattcattcccaaaaccgagcagccacccatctcagataacactccctggggtcgtgcgcgtcgcagtcctcagactgttttccaatggtcagggaacagcgccccttctttgggccaaatttggaacgtgattcatgccatttaccttggccatccaacaatcgaatacttcagactgactctgtccggcgcggggcaggaagttatccgcaatgaacttcttaccaccgggttggcaatcgaccacccaaggaacctgcgggacagagaaaacaaagctctgcagttcgatgaattgctggtcctccgaagcgccttctggcaaggtgctgcttctccattgggccctcgtcccatctgggtggtgggagatggcacagacggccccatgcgggagcctttgtcccaatatcccctcatgccggagaactaccaaatgacaaataagttcccggaggagcctgtatatacccgccacccaactcgccgccccaagccgcaccccggatctattgcctacagtcgatacatcccagagatcaacgagcacttctcacttgaagtagtggactggcaagatgcagagcacgtccgactgtttaacaagtggcagaatgacccgcgtgttgccgcaggctggaatgagactgggactatcgaacaacacacagaatatctgcgtaaattgcacttcgatccccatgtgctgtgcctgttcggacgcttcgatgatactcgcttctcgtactatgagttgtactggtcaaaggtaaatcccccggctcagtcgcgatttaatctggcgctgacactaacatcttgtttacaggaggaccattacggcgcccactacgacgctggagactacgatcgcggccgccactctctcgtcggcgatgccagcttccgaggtgcacaccgcgtgaatgcctggtactcgagctgcattcactacgtcttcttggacgatccccggaccgttaatgctgtcggcgagcccaaggccaccggcgcgaccatcttgtcttacgaaaacgcgcagggactcacaattggcaaatatgtcgatctcggacacaagcgatcggtgcactcaatttgcagtcgcgaaaagtggttccaactgtgtcctctattttgggatgggcgtgagcggccattagaatctgccgaccgtgccgcgtggaatgccaaactgtaaatttgcttgatctttcttgactatttcttgtctcctgatcggcaaaacttacaacacacaatgtacaaaatttcatgagatattcttttttttcatttgccatctttctgagacaagtgggggtagcccgtgtctctccacctcgagcttcctgtttccggcagttcctccaagcaacgcgttgtctcctccgctttgccccaatcaatcagataatcttcttgttttcttttctttttttaagatttgcatgctatgatagaatccacctgaattcgttgcctttgtacataataccaatgacgttgtgtatactgcatgtattcttatagaatattcttttcggacatttaatatgccaagatatcaaccagtatgcatagcgctgtgaaagatcaaagcgaaaataaatatgacgttcctgcaggctccgatagagtggagacgcaagttccaaaagccgaaattccacattttaaaatacttaccgatgtattatacagatataaaatacatattcttacatgcaatacagctgtaccgaaccggccatacacgtacggacggaagtggggaatgataatacatactccattttgatctgataacccccgtccgtataattgaaattcttcatgcccccccaaagtgggttgcatattcggatcaaactgtcaaaaccgatgtcggctgattgaaaaattagatcggcaggttaaacatccggaaaccccttggaaatttccatcttcacatttggcatacatccttgtttgggtcttcgtcgcaacccaagttaagtcgcttcaccgaatggattcacgctaaggagtgggtgcgattttcctggtgacgccactttcaagctagaaaaccgagaaattgatcgcctgtgagaacctagcttcttcaacactcaagcgacaattccagtgttgaacgccattttcgagtcatcatgggtttcgggaaccttgcagactacccaaggctgcttgtggctgccaatccctcgcgacttgaattgggaaccctctttgttggcctggcgtcttcaattgcatcgggtgtccctttccccatcatcggtatcatattcggccaactgatcgatgatttcaactcggtgacctgcgaggaaacagctagctcttcgggaggggattctagcgatcaatcagacatcaatagcaaaattctgctgatcgtgtacctgggaattgctcaatttgttttaatctaccttcacctactatgctggacgatgaccggtgcgcgcctggcgcagcgactccgcgaaagatatctccagaacctgctccgacaagaaccctctttctttgataacctgcccgccggagaagttgcctctcgactcaacaccgatatccaaaccattcgctccggtacagctgagaaggtcggaatctgtatctcgagtttctcctttttcgtcaccgcatacattgttgcctttatcaaagactccattcttgctgcgatgctgctttccttgatccccgcatacttcatcatgtcatttgttggaagttactatatcgagaaatacaccgggcgcatgtcggattatgctgcttccgctgcgtcgattgcctctgaagcgcttaacaacattgttgtggtgcatgcctttggtgccaacagtcgtctggagaggaagttctctaaggcactgaaggactccgaaacagaaggattaaaaaaggccagtgcgactggtattcaagccggtgtcttgtacttcgtcgcatatggtgcgaatggtcttgcattctggcaaggaagtaggcaaatcgccgcggcagtgcgcacagagtcggcgggtgctactgtcgggtctgttttcactgtgatctttgtcttggttgaaggtcagtctgattgatgtcttattgtggagtcttttactaacgataacgacagctaccctgcttctgagtcaagttgcacctttcatccacttgttcacacaggctgttgcttgttaccacaagctacgtgatgacattgagcgtaaatccttgattgatggatcatcggatgcgggtcttcgcctcacccaggcggaaggcggatttgaattcaaggatgtctctttcatttacccctccaggcccgagatcactgttcttaacaagatcaatctctccattgcccccaaaaagcatacagccattgttggtctttctggaagtggaaagtccaccatcgcaggtctagttatccgcttgtacgatgccactgaaggtgagatcactttcgatggccagaatattcgcgacgtcaatacgcgtgacctgagagggttcctcagtctcgtgcagcaggagccctcccttctcgaccgatcccttttggagaacatcgcacacggcttggtgaactcaagcaaaccggcccatgcacacctgaaagcggcactcctcggaaccgacctctctgatctagccactgaagtcagggatggtcaggatcttatgaccgcagcggagagacggggaccagaagtcgtcgaaatcgttcaattagcccggcaggctgcggcgcttgccgatgccgatggctttatcgaagcattgcagtacgggtacgccacgatggttggatctagtggtcgactcattagtggtggtcagaagcaacgagtgtctcttgcccgtgcccttgtgaaagatcccgcggttctcattttggatgaagccacggcggctttggattcgcgcagtgaacagcgtatccagcgggctatcaacaacatctcaactggtcgaactgtcatcacaattgcccatcgtctgtcaacaatcacaaatgctgataagattgtctgtatgcacaagggagatatattggaggagggaagccactcggaattgatggctgcgaatggaccttactccgagttggtcaaattgcagactctcggagccacatccgcatccaacaagactgatactactgccagcattgagagcgtcagtaagtccgatgttacctctactaccgacgtcgaaaacgagaagggcagtctttcaaatgacgttgaacccacgaaggaagcccgtgtctcgaccactgaagcaccagctggtgactctgaggaagaagaggaagagcttgagaccccagtcaaatctttgtgggctctttgcaagggctatgcaccagctctcaagccccatttgctcgtcatcttcgctgctcttttcggttccagcatggtcggcggagctttctctggcgaagccgtcattttcggaaatactgtcggaagcttgaacccttgcttcagtgcagccagcattagcgaacggggtaacttctacggtctgatgttcttcgttcttgcgatcatcgagttcttcgccaacatcgtcagctggggaggatttggcctcgtctctgagaagttggtctacaaagtgcgagtgttatcgttccggtcactgtttgaacaagatctgcagtggcatcagtctaagggccgatcccctgctctgcttctgtcctatattactagagacggtaatgcccttgccggtatgagcggatcggtcattggcactctgttctctatcaccgttaacctcatcgccgccattatcttgacccacattattgcctggagaattgccttagtctgcctagcccttgtcccccttctgctcggggctggtctaatggagctgatggtcctcggcaaattcgaggagcgtcatgaaaacgcctacacaaagtctgtcgacatcggcgtggaagcaatcacctctatcaagacagtcgcctctctttccctggaagaaaatactctacagacttaccgacgatccctaaaaggaccccgcaaggagacattcaaggttaccgtgcaagcaagtctgtggcaagccatgacctatttcctaggtaatatggtgaatgcactggcatactggtggggttccaagcagatcatcaacggcaactacactcagacccagttcctgattgttgtcttctctctcctggtcagtgctctgctttggagtcagatgttcgcactcgcacccgagctctctgccgcgcgatcggcaatgtctagaatccttggcttgatcgagatcggcaaggataagatgaattcccgactcacgccacacgacaaggatgttgaggcaatcgacgagaagcccacgtacaactccggcagctcggcctcgagcgtgcagctccgcgatgtccacttctgctaccctgcccggccagatatgaaagtgctgaagggcttgaatgttgatattcggcccggcaagttctgcgccctagttgggcccagcggtgctggtaaatcgactatcatctccctggtcgaacgcctgtacacacccgaatctggttcgatcgtgatcgacggcgtcgatgtcaccaagacctcggatgtctccttccgtgactggatttccctggtgcctcaagacagcgttctcttcgaaggtagcatcgagtttaatattggtctcggtgctcgacccggtcacaatgccacccttgaagaaatccaagaggcttgcaagctcgctaacatccacgatgttattacttcactgccagatggctaccagaccctctgcggaccgaatggtaaccagttctctggaggccagaagcagagactgtccatcgctcgtgctctcgttcgcaaacccaagcttctgattcttgatgagtcgactagtgctttggacgctgaatccgagaagctcttgcaggatggcctggagaaggccgcacggggaatcactgtcattgccattgcccaccgtcttcatactatccgcaaagccgatgtcattttcttgattgatggcggtgtatgcactgattctggatctcatgatgaattgctcgagcggtccgacagctaccgggcgaatgtcatgcaccaaacagtagcgacttgaaaaagattctaggttccatttaaattcttagtacttgtttaatatatatcccatttattcatttttttaccagtgccaccactccccacttccccccttctatgggcatcggaaatcacctggaatatgaggatacaaactggtaccagcatagaattgcatcattccaccgaatgcgcgaaagcaagcagggtcctcaacctgctaaggtaaggtccttaggctcggcgttcttgatcatcgttgtaactaggtttcgcaggtgaattggcgaatttaaatgccgggtagcactctggtcatcgtcgtaatcaactggcgaggaccctctagacctcgtactcaccatgatttccaacgactgtagggcgggaatctggccgtggaggggctttatagtagtgaccttgcgtaacttctccgcgtgaaagatcaggtgcactttgctagcttcaggaagaccgagtttaaatgaccgggtttctataggatcttatatgacccgccaagttatccaatttccgactggatcttttgtgtcgccgagtccttgtgtttgtgataaaagaccaggtcgttgatattggaatcgggatctcgcctatgtttatcgggtttatgcatatatatacatcctaggccagttatgaactggccttagtccgactccaaatgtgtattatctcaaccgcgcacttcccttcaggccgtgtttgacgagcggacttagcagtttgtcggtttatatcatttataaagggcgacataacggttgagtcttgtgggaatgctactgcgaagtgtactattggtagttatagaaggaataccctcaacgttaaaagaaatatgctataacgtaccaaaaacgacgcaatcaaattaattccagaccatctccaatctatcttctttacaaaaataatcagatatcatatatcatattcagacaccaagagccaggggaccagagggacaacccgacaactcctgaacagcagcagccaactcatcgagagtagcatccacaaacgcctcgtccctttcacttccaacaaacccaacatgcatcttgccaccacgcacaaacgagacagccttcaagggataagcagcatcaccatgtggattggaaatatcaaccttgcaagaagacccagcgaatggcatatcatcgaaatcatcccagtcctggtgatggacaatcgagtcaaaggactgtgcctccggtgcccactgcgcgcactgctttgagatcttctcgaatccgaggaaatcgtgcgccgcagactcggcactctgtttctgcacaaagcgcatcagatccatcgccgtccactgtgactcgaacttcactctcacaggagtgagttggtagcatggacccatgacgttctctacgttcgctaggtcgatggttcggcctgaggtcactgtgccaaatgtcacatcgggtttgcccagacgacgggcgagtatcagtgcccatgctgcggtaagtacatttgctgttgtaatctcttggacgggatggaattcttcgaccgccttctcgtggaagatggctttgtctgtgggttggacggaggctccgtcgaggacagacagtgtcgagtccttcagcagatcactccagtagttgactgcctgggtttggaggtttccgtcggaaactcgtgccatgtacgaggcaaatggctcaaagtccacaaccttgtctccggtgtatagagtctccaggtcttggagcagcctggggagggagacgccgtcatactgggagtgcgaaagacccagcacgaggcagtgttttccgtcagcgccttggacatggaagaccttgaggaacggtgatccaagctcgaagtttgattcaatgtccgttgtgcagagctcggcgacgtattgttcaatctccttgtcggcctggtgcatgaccacggggacatgtgcgtcttggaggacaacctgaaggaaggacgactcgtgctcgatgaagacagtacgcaaaatgtcgtgggtcttcaccagatcattacaggcgcgtagcaattgctcacggtcgatgttttggtcgaagtacagcatggtgtattggatggaagtgcgtggcactccaatggttgctctgatgtcgagcgcttgtgaatccgtgaccggagacacatcctcgataggccagcctgggttggcaagcttgggccgaacagttgaggccaagaacatcttgacgtccagattgcttagtgaggagaaaggcttgtatggctgaacgctttccttcacttggtccaccttcagcaccttggctgcatcacccagacgcatgtgttggaagatatcggctactgacaagctgtgtccctgtgtgcggagacttgacaccaatttcattgccaagacagagtcacctccgaggcggaagaagttgtcgtcgacgtcaatctgctcggggctcagtcggaggatctttgcccaagcggattgcaggatcttctccgtaggcgataggtttgtctgcgccaagcccttcgtccatgcatctttgaaacctccacgaagatcttcgaggacactttgaggaatctttgaggccaatgtgttgagtgacgtgtgatcgagttgctccagcccagtgggcaacttgtcaactacaacgtaggcagagggggccatgtaggatgggagtgagtctcggatgaatttgtcgagcttctttaatgacactgcaagtgtcacgggaatagtgtcgcagacagtcgtctcttccccgaccatctcgtatttcgccggcatgactcttacactgtcctcctgagaaggctggttctcgataaagacagctagctcttgctctggcactttctgagtgccttctctcaatggctggaagacagatgcagcagcgcgagttgccgatgggaggtattttgcgaaatgtgactcgaggtctgcaatatccactgcatgtccttgaaggggtacgacattctccttgcggccaacaaacaccaggcttccatcatcctgaagctggaccatgtcacctgtaggctgcacctttccagtccggccagcgcatccagaacttccagccccgagccacgcaggggactccactgtttccccagagaggcaattcccttcaagccagagctcaccaacactgccgatgggcgacaacaaatcaggattgcgagcatcacacacccaaggaatggcagtacggggatagactgatccttgtttggtgctcgcaggggcgcgaaggttgccagtggtttcgtccacggaaagaggaggagccttgttccattgccaaatttggtcaacttccgtctcgggaaggcaagagatctcatcaatacgtttgttaagacccttcgacaactgcacgcaagcggtctccaactgcgcaagaatgcgctgcatctgcgaaccctcgatcaggctggtatcgaaactagcgcaaactctgagaccacccttgcggattccgaacgccaccatgagcgggtatgggttgaaatgaagcgcctcacgcacaacatctccaagctcaaatccaagctcgctacccacgtactccgggtcaggctggataaccagtccggtgccagcttcgcaggcatactgcgcatcttggctgacctttctgatattctgcattcccatgtgctggtaaggcgtacgagccaagacggtttgctgtaccgtctgcaagtacgattcgactgtgttggatcggcgaacctggatgcggatggggatggttgcaatcagtggtccgacgatgctctccacgcccggcaaggcaatatcacgaccagtaagtgtctcaccgaacacgacatcgtcacttccagtatattgggaagcgacgagggcccatgcaccgcggaccaatgtggccatcgtgaaaggtgatccggcacctgtctcgagggccatctgatgctcgatcaggccattgggagttggcatgaagtcgcgagagggcaagcgggggaactgaggcccgacagcgcccttcaactcccgtcgccagaaatcatgcatggcggtctcgtctgtgtcgcgtacgtacttcacaaaattccgcatctgggtctggatctcgacagactgattctgcaaggcatcgctgacttgcttgagaacgattggctccgaccatccgtcgtagaggacgtggtggacagtccataccatataccgtttatcatcgttttcattgctgacaaggccgtatcgagccagcctttgtccaaggttcatcctctcgcttcggtcattctcgagatattggtccaggttggtggagtacctccaggagatgccttccttcacaacaatttgttggaggcctgggtcttggagcggtgccagacgagagcgcaggatagggcttgctgcaacaacgtcttcccaagccctcttccaagcatccagaccgatatgcgacggaatacatgcgactctttgagcaacatacgccttggttgatttgagcgagaaggtgaacagtgactcttgcgtgggtgtgcaaaggtagatatcttgcacatccgcttgatccactccacaagcttgtgctgcttcgaggcgggcgctctccacagattgggagattaaagaaaacggctggatctcttcctgcgtttgggagctgcaaggctgagcgacggtggccatggccgagagggtagggtttccaaaagtgctaatgacagaaagatcgaggtcttgcgctctgcagacagacacgagtctcatcgcggccagggaatcaccacccaaagcaaagaagttatcgtcggggcgaatggcttcagcgtcgagcttgagtgtttcagcccaggcctgtcgcaggcgtttttcacgctcattcagttcccgagaagcggtgcttgcggctccttggtccagttgacgcaaatcaactgtcgcgccaaatgcccggagttgtttgcggtcagtcttgcccgagatcaacactggcataacattaaccgggatatacgtggtgggcaccatgtatcgcggcaaagtcttcgccacgtccgcattagcctttgtcaatatgctgctcaactcgcttgagatctcgtccaaggcaagctcggcctgtccatgccccttcggttggaaggcaacgaacgcaacgagcattggctggcctccataatccttgggcgtaatcacttcagcaatgacattagcttctgagggcagaacagcctttagctgactctcaatttcgcccaattcgacacgctgtccacgcaacttgacttgagtgtcctttcgtccaacgaaaacgatgccgccaagaccatcgggatcatatcttccaagatctccagtcttatacaaacgaccctgacgaccagggtagtttttgtgacctgcgagcaaccaaggcggatcattgatgaaagcagcggcagtcttttcagggtcgttcaggtagccttgtccgacaatcggaccctcaacgagcagctcacccacagcgccgactggcacaagctcgttgtggtcattcgggttggcaatccacatggctgcgccgttgcctgggccaatggagaggtaatctctgccggtagcagcgctggcgttgactgtgcatccaatggtgcattcgcagggaccgtaaccaatgatgattctggtttccttgccccagtgattggcgtctcttgccgagacagcttctcctccaagacctagaccactcaacgatgcgataacatccgcatccaggattcggcccacagagggagtcaggcctgcgtagttaattctcattttgcggatgacttcgttgatgtcattcaatcgatcctcgtcggacggaatgcaaagacagccaccgtttccgagtgttagaagcatactgtcaatgctgacatcgaaagcgtaggatgcaaaatcaaggaccctggactccggcgtgtatccaactgcctctgctcgagggatagcactgcttgtgtaggtttcgtgagaaatcttcactcccttcggagtgcccgtgctgccggaggtgaagatgatgtacataagggcggaggatggtacagcaggtaagtcgcagattgatggggagtttgatggatttgtgaaagcatcttcttcgacaacgaagtggtttccagttggcagaatcgtcagtgacagctcatattgcttgcgggacgcaaccatcgattttgcgccgacctgtacggccatattttggagacgggcaagcggaagagttggatccatgagcgcaagagttgcgcctgctttcatcactccgagcacagcgacgatcgtccacctggatttctcaaagcacacggggaggacatcgtgcagctcgacgcccatttctttgagcgagcacgccacggaagtggaccactgatcgatttggctataggtcaggctgccatcccaggaatcaatggcgactttgtctgggtattcgcgagctctttcggcgaccatctcttgcatgcagaagctataggtgggcggcaattcgtagttccacccccatatatcgttcaggtcacttgcagtcgggcgaagacactgttcaatggtggcttcgacgttttctaggcatactctgacagtgtcagcaagtgcctcgacatggtgattcactgtgtacggcaacatgttctcggtgtgccacaatgggcggatctcgaggtgggcattattgaagcgaacttcgagatgaagcatgcccttttcaattacggttagttatgattgagcggctatgggttcaattgttcacttacgtcatctttggcttcttcggatgttcgcgaaagagagctggtgctcaaaacgagcgatgcgggacttgacgcccccgtggtgatattccgagagatcgcagtcgcaacttctcccacattactttgtaatcctttcattacttcattcatcactagtctgctcactgatgcgggctgaacgtcattcgcgacatctttgtaggaccagtcgtatgatatttggctgtcttcccggctgcgcaacaggaccatcagccatgacaacagcacgatctcttctttcatgccggtcggagtggtggtttgttcggaggcaagatgcgcgacctggaatgagctaaatctgccattcgcatctgttggcagtttctcaattccatttggcgcattgtggatgtgggcatcttcgagaggtatgaagcccatcttgacggctgaccagcacagctggtcttgttaccctcgaggtagtgtgagggagtaattagagcttgactgttaaatccgcaacctttgggtcgtttcgatcgtttcgacggaggtgtgtcactatatagccaactagccacggttctgctgcatcatgctccaccccgaggcttcaaagctccgaggtaccctgcctggacggagtacggaggatccattttgcatatcatcaccgagatcggctattgcggggttattcgacacacccagttctggaaggcagaatgatacccgaagcatgtggccgtttcatctttcctgacatacgtgtacctacctgggtagcactaggtatgcgatactagatctcacagcatacaatacggtacggtacaaaacgtatccacaggctccacatgagagaaaagaggaaaaaagacgagaagaaatgctacgccaagattgttccaatggagcgcacccggttgagttaggctgttgctcatcatcaatgaaaagtacctatgttgtaggctatgaggaagagacgtgaatatgatcaacctactctgaaacacatcaagggcaactcccaactgtaaaggcattgttcaccgaggtattagtatcggaggccaactgctcaggggacccatgattgtgcgtcccaagcggaaaagcccgatggacaagggaagtgaggaacgagggggattttggacaagacccacctttagaatcgccgatgcgtcgtgtacacttttcgcaacgtaccaatatagaatggtccgaatacaccattaataatagttaataatatctgctctctagcgcaacaagtccgaaacagaaaaaaaacaaaaaacaaaacaaaacatcgaaaggccttactctatcgtgcacgttcctttgatttcttggctcgcttgcagacaaatttgaatggattcttccaaacgccacaaaaaagcccatccactcgtctatattacttaagtggtctgggacaggctatgtagatattttggtctggatttggcacgatgcctcgtctctaattccagtgcatggaacgagtgataatgagcatctcttcaggcaaggatcttcgaatatgaagcctgcctggtaaggctgactattaagttcaccaagacttcttaagcatgtcaagaaagtcttgtctcgaagtgccgactgtcgagcacgttgagtagagttttcaaagaggggctatctaatcagattttcatgttctcagccaatcaatctaatcagatccgttgatcttactgataacggctagtgtcgactagcccacaagtgccccacagctctggtcttaccggtggggtttaattggcccatcgttatttcccgccaaagcttcgtgtaattactagcggtactggtgagacagggcttttattgttgtatttaccattgggatgaaatacataccgtggtatcaatactcggtatttcccggacgggcctactgaaatacatgtacctggttcaagacatccatacatataatttcctcaaaaagatgttaccaacattttccttcctaaactggaccttagcgctgagcattccatggatgtgagacttgttacctaatatttcggcttcgtataatcagattgataagatggcctgaaacagttcacctggtggatcgacttcggtgcaagctaaccgacataaattgtccacattccttcatagcggaaagacacaaagcccgatctcggcaattgttcgattaaagaaaagatcctgtcccggaagccttctctagctccttgaaagttttccccttcaattaagccctgcgcactaccacacctacaccacccccaccaaacacacacttaccaacatgtctaagttctggcctaagggaggccttcccggtattctgcaccactacgtacgttcctgcactatcaacaataacactcaaaccacaactaacaattactcccacgtagacggaaaccctcgtcacattcgaatatgccaccagcactatccgccaaccacacagtctcctcttcatcggcggactgggcgacggcctagcaacaacgtcctacatggccgatctcgcgcgcgcactacagcaaacagaatggtccctcttcactctaaacctcacatcctcctaccaatcctggggtctcggccatctggaccgcgacacaaacgagatcgcccaatgtctggagtacatcaaaagctacaaaggcgataaattcggcggcggcaagatcgccctgatgggtcattccacaggcagccagtgcgtgctacactacctatcccagtcaaacccgcacacgaaggtgccggccttcgacgccgatatcgaacacatcaagcggcctgtgctggacggcgcgatcatgcaagcgcctgtttctgatcgcgaggcgatcttctgcgtcttgaggggtggtattggtgatacgacgcccgagaaggctcgtgctgtatatgatgagatggaggcgctggctaagcaggctgttgctgagggcaagccgcatgatactatgttgcctctttctttgacttcgatgatttatccggccaatacgccgattagctgtcggagattcttgagtcttgttagtccggagagtccgcaggcgccgcaggaggatgatttgttcagctcggatctgagtgatgagcactttgcgactacgtttggtatgattcagcagcagggactgttgaatcataagttgatggtgctgatctctgggaaggatcagtcggttccggattatgttgataaggagaagatgctggctaggtggcagaaggctactgatcatgatggcaaatatcagatttgggatcaaaagcacactggggtcatccctaatgcttctcatgctttgagtaatgatgaccaagctgagccgcggaggttcctggttgagagggtcttgggataccttaagacggctgtggagagagcttgaacgaatcgcaatgaaatgtatgatactatattaaatgaaagaattatataccatttaacatgcttgtcaaccgcgtgcgacatacaaggtggataaatcctcaatacggcggtcttcgaggtcggctctcacgagtctcccagttgcacatgagtacgtcgtcaatagtcaattcttcgtgccgttataggagcttggagggttaccttgagagtagacgaatatcacctcttagctctagctcaaactgaagtcgcttgtgacgaggaaagactatgtctgatttaagtagtctacacgacaataacagctagtatagcgagtggtgtatccattggaattgaaaagaatagagtacatacgtggaagacgaacaaccagctcaagtgtttctaacaaaaaggaaaaagaaaagatcgaaagtagacatgagacgctcaaatgcaccgagtggtatctagtcgtcaacagcagaaatgataaaagagagtccagagaagaaaagaaaagcccggaaaagggatgcgtaggaaacggtaggtagagtagatgtaggtaaatgagaaaacaaaggaataaggagagcctaagtcaaggcaaggtgaatgaatgtatagagaataggaagggaaatggtgtttagaacatgcctccttcaacggggatagcgggaggcgggtattgaggaatagccggcggagtgccggtcatggatccctgtcgcgcccgcgcgttcaggttaccagcctcactcgatgtcttgcggagacgattgcgggactgcggacgtttttcttcatctgggaagacgctgtgttcgtccccggcgctcgggacgggggaagcgacccgtgaagagtcgttcttgtcgctcttgaacgcacccaggatggtttgagtggcggttccgcggcgacggcgggggttcatcggtggcactggaggtgcgccgctgggtgaaggcagcgcggatccagggggaaggccgacgagagggacgtttgatgtggatgagacaaacgtgggctcggatatctgcttcttgttcacggggcgcttcaggagggagccgtgtcccagaccacgctggggaatctgcggaccgctggatgaagaagccagtgatgtagacgagctgtctgacggcatttcattcagcggaggagtggcattggcagagtacgccggggcagcgggtggggcccggggagaagcaccgatgatcgaggacgtgttggactgcgagaactggaatggccgctcgtattggaagtttggcgtaccggatcggctgttactgcggtatctgcccgaagcggcagagggagcgcggtcaaagttcgcaggttcagacatttctgctgatgggcgacccgatgtagggcgtgagataggcacgggaggctcatagccctcagggacaacgaatttttcatgtgcaatgattgatccctcatccacagtttcaaggtcatccctttcacgaagcctggttcgactcttggaccggcctgatgcatccgagcctgcacgatctctctgggttcggaaaggtgagtggccacggctgcggctggactcgcgtgaaccttcgtagctattgtcgcggctgagagatggcatacgagacctgagcgaacgctctggtccaatatggggagagctggagttggagtgccggccgaagctgaaagagggccgctcctcttcacgccacgagtcatctgaagagagagcaggcgtggacgaattgccaccagcataaccgaacaacttcttctgatccggcttgccgccaatctgtttgctagacttttgcttcaacatggcaaatgcgttaccagccctggccaagtctggagttgaccggcctggagtgggactgctggatcggctgtcgctctcagcaacacttcgtagcttctcctgcacctttctacgcctctctgccagctcgatggcgaattcctctcgctccctttgggtctcagtgctcccatgacggcgatggtgaagttctagctcctccctccaggacgagccgttcgatgcggaagctgtgtcaggaatagttccaggtgcagatgactcttggctatttcgagaatgcgtcccctccgcagaatgtccggaaggagcgtgcgagcttgatgttcctgggcgacttcctgatgatggccgactctcttcgcagggttgtgctatcgtgggaacatcagtcgatggctggggggtcgatttctgagtctcggccccagggggatggctatcgttctggtgctccgggaagcgaggtgaaggaggggagatggctgatttctcactttcctggcgcaagtgagatcgaaccattccccccattccgccaaagccttgatctggttgcagagttggcgagtcaggtctcttgggtgtgttatcgctgatgtcaggggaagtagttgtgcagtcagggtcattctcgtcgataggtctaagatcacctagatcggaatatctcacttcggggagcgtttcgaggtgatccttcgtgggagttgatggcttgttagatgctacgctagagcgctgaagcggcggaccgtactcggtggccagcgaagtcgcagacgagagatcgtgcgaagagcggttctctccttcatcgccagactcgctggcactggagttggcatagaaagtcctcactccgggtcttaagggagaagcctcaacgctgggcgcagaataatgatccacgccgcgttgcgcatcactactatagtgagatgaggcggactccgctcgggaacgatagctggacttcgatagtccccgagcacggcccgcgggctctgcaggtagaggtcgacgcgggggtgatgcacggcgcggaggcggggtctctcgtccctgatgcatttgaagttggcggcgggagaatgcctgctcgtcgaaaccggtggcgggtcggttgaacaagcccatggcggtagcctttccatgatcttctgggtgaattgatgcagccaacagggacggaacctcgtcgttctcgctcgtgggagggctcaggggaggagccccgaacgttgctgttgtgggcgagagacggtctctcaacgcaggttctccggacatacgcagctttggtgatgtggcggatgaaggagggctagtcggccgtgaggtagaagccggttcagcaattgcaagcttttccaggcggtcccgcaagttggtggcacttctggagtagttacggtttaaagaggggagatctggggtgccggcacgctggcgactcagactctccaggcggttcaaggttgagctctgctggttctgggcagtctgagtcaatccttgtccgtagagacgacggctccggattgaaccattgcgcggggcagacatggggccaggaccgggtcgcggggcctcaggaagggtttcggggaacggatacccagtcactggagattgggatgtgttcaaggatgactcgtcggccgaggttcctgcggttgatgcaggaactgttgacgaaggcccagatgcggtggaggagtacgtggctcgactgttagatgaggctgttgaggcggcatatccagattcccgagcggcctccgccgatctctcttctttctccttgaggcgcaaccgctggaacgcagatagattcatgtcgtggtcatagaccggcttccccattccccggcgactagcctctggcgcatcgggggttgatgtccctggtgacctgaccgggatcttgtaaatcttttggcgaccaccgaacagattattgccctcagtgcgacgggccctgctcatcatactgcccgtctgcgatcggtcgtcgtctgtaccatatccatctccaccggaagcgtaagaagcggtgcggtcgagtgcaaaggatggtcgacttccgtcgttggagctaacttcgtcaatatctgccagcatggcggggctgtgaccgaataagttgagtcgcgaagcgcgcttgggaaacaagacgctatcatcactagccttgcccagcattgatagtgggtcgtcttgttccttcagcatgctaaatcgagcggacaatttaggcatcagcagactggtgcggaagttatctgtcgggggtagtgcggctgataggtcgaagtctggtttgggttccggttccgccttcttcttcgatggcttcaagctgaatcctggcgatgtcgctccttgatcctccgcggcctccttggccttcttgtgtttacggaatcggtccatcatcgtgaatggtaggctcgaggcgcttagggggcacctcgtaataggaaaggaatgaatgcgattcggtagtatttcagatcggtttggatgaatgtcgttaaatccagcgagtgtgtagtagcttaagagttgatcagtgtccctgtttggcccaatgcctcgaaggtgactcaatggatatcgttatccagagaatgaaatgagcggcatgaccttcaagtgcaatgagtgtagattgaggttagggagagaaatgtctcctgaagagaagaggcgcaaggaatgtcgagttcacgccgtgtaccgtgaatggtccagatgcaagaccaatcaaagtatttagcggggattgacagatcacagcatgagagaaatgggaaatatgcagagtcgagatgggaattcaaaaacgagtgactggggaagatgacgcgaagaatgcgatgagaggggagatttggaatggatccagaactgtaactgtccaagactctcttttttagcggcataccatatttactaagaaaaaaaaaaagtaaaaaaagggatctagatgatcgtctcaaattggtgtccaccgatcaacattactgttcgatgttcttcttctgactatatgtttttttttttttaatagattatcttcaggtttaattgtatggaccatctccatctgtttatttactgtttcagtctgttgtcggttgtatactgcgtccatgaggccccaagggggcttcccgaggctgcatccatggtccgatgcaggtacggtatggtacagctactcgggggaacagtgcagattctccgagagatcaagtatccatctggcaaaattactgtaatgcatttcccccttgcgtataataaaacttgaaatgttaaggatcacatctctcttccccctctctcttccctctcttccctcactcgcttccggaatgtggaacctggggctgagcgccaccctaactgcgggataggttggacatgtcgatgtggccaattcttttcgaaacatgcaatttgatgtccgtatgtgtgtttccctacggagtacggggactccgtaatgaacggaagagaaacaatttctcgctaagaagtcccgggggcctggacacgggagacaccaagatcgtcgccccattacttcattccacagtatcccacagttcggggcaagactttgatgtggaaggtggtcacggttcatccaatctctcatctcagaagtactccgtaggttcaagtcactgtcacacacaatataaccccattagactccttgcttttgcaggaacccggcagcaagggaaattcattggttgtaatctacttgggctgaacagacatgtgatgttgtactacaatatgcaatgaagttagaagatgggagattcgtcgcgatcataatctgcagcatgtccaatgctgtagagcaatatattgaaaatatgactttggagaaatgagcaatggcgtgtacattgtaggacaactcagccacaatataaggaagcgtgtaataataacagattaggccaagacctgaatccatgaatgttccgactgtgcaggacctcttgcagggtgcaggacaatatacggagtagtcgcactcgactctgcatctgatgaggctatgtaggaccttccgacttcctatttcggaatggtttgtggacgcgggaggtcagagagtagctgaaccatgggtagatgctccgatagagtccagttctctccactcgaacgattcaaaggtttttctgatagtctgttcaccaaagaggatatcttctgtgtggtggaacccatgagatggagaaagaactaaaagcctagaacgggaaaaaaaaaggagcaaatttctttagcgcgacgatttggccggtaggcttgacagccgtttgggaaggccccgcttagcttttcaacttccgagattgactggaaactattagtacctaacctactgttgtaggtacgtagccctagaaagtccaaaaaagaaatgcccaggtggtaaaccgtccacgggtccggccttagttggtggagtgcccctgactagtcctaattaggatagtaattttagcactttatggtttatttctttatttctttttttatttcttcctttttgttacacttttgaagacatacaggttttatgtttcaaatttttagctatatgcaacaagtatgagacctgagagaattgatgctaagtttgaatggagtacggagcattgagaacgcaccggaaagcatccgggtcctaacgaacggagcaatccgcggggccaatcctcgtggcccaaaaagttcggtttcatttttcccaaagaaaaaatcaaatctccgattttggacatgtcactgccctcaaaagtccaataacaaaaattccatatactgcaccaccgagtgccacccgtagtatattgtcaccttgcattgatctatacttccagaatgcatagaagccaatacaatctgatatctgatattcgcgatcagcccggaatctaggaaccgatcgcgaatatcaatatccggagtaatagccggagatccaggggcttccaccaacatggaacaccaaactggtggaaactcaacaaaataaaatgaacgaacattataactggagcccgatcccctcccctgtcggatgaggggttgctgagaccggggcttcccgcggtctctcgccctcaacaatgttcatcaagtgcatatgttgtagaatttaccaggataaatcgtatgaccaaggcagaatctgctcattgcctacacacggaatcctccgtacagaggagtgactctttgatctcagacatcgggaccacagtactccgaacgcacgcacatcatcatccgcaaagtatgtacggagtaagttttgtgcctgattgtgggtttaccgagtttgaggcgctgttttactcggagggtaaaaagggtaaaacagtaaacccgctacgaattggtggagtcggcagttgggtttggtgcccgtcgaattcgatccgttaattaaagaaaactttcgcaagaattctgttaatttatttctgacggggcgttgggttctggaacacagaactaggcttattggcttcgcactatgttgtaggaactccctgttatatcctcgtgttggccctaattactccgtagaaccttgactattccgtactcagtacggagaacagtttacagtttggtgaattggatttattagacctgccaagagatacattgtcgtcatcgctgcgatacttccctgggaaagttagatgtgcgactcgaaaccatctcttcgtttccttgttaaaccctgtttcggaaataattgactgcgtaaaaccactcatttgtaaagccaaacagactacgtatgtagctagctggagattcgcctgtccagtatggcacaccttgcaatgacatttgcttgtcagggccgcttagatgaggccgagcagcttggtacacaccctggagatacgcaaggctcagctcggcgcgaacgataacgacacgctaataggcatggaagaactcgcaaagttgtatgatttagaggaagctgaggagctttcaatctcaacaatagagacaaggaatgctcaattcagcgagaatcatcctaacacgctgacaagtatcggaaaattcgcaggagcgtatagaaagcagggccgtcttgaggaggctgaacagcttgctatgcaggtgatggagacacacaatatcgtatctgggaaggtccatcctgacacgctcctaagtgtgcgggatgttgcaatcatctggaaactttccggcaaaattgcagatgcaactcatttaataaggaatcgattacctagccaaggaagaacaggccctgggattcagctgttataatataaaggtcgatacaaggcaacatttgaagaataaggcgttaccatgagataattggactggcctcagatacgctgcacctgaacctccagatacctcgaagctcgtaatcattctcgtctgtgcgaatacagttgcgcttctttctggctttgggatcacaggcaaggcgtcactgtgttataactgatttcgagcgtccgtatatacaaacgaagcgaagacctcttatagatagaccgaaagacgaggatattatctcatagtttgctcaggatataaacatgcaagatgtaccattgacaaaaaaaatacgaaaaagctgtacgctcgctcaactctccatcacacagggaccaccataccccatctcacattaccacaccgagtccagatgattcgcgagaggggagcaggacaggaaaatagaagagaaaagggagaagaatatagaagacaggggagaaatgtggctccttttcattcatacatgatcccacccaatctagaaggggcaagcaaaaacacaaaagaaaggggtcgtctgctcatagcgcaataactgcaacaaaaaggtagaattctcaaaccagaatcctttcgtccagttacttactggttccccagcccacccagctacggggcatcactcgccagaccttgcattcaccactacggaggtcgtttagcttgaagctctccatcttgaccttcttgctctcgcggccttgctcccaggctcggatcttcttcttcgtgccatcccaatcaaccacgatgccgacgtggtcgggctttccaacctcggcggtgtacttctggtgcatggtgccacggtggccctggaaccgggcgttgcggaagctgacaatgtcaccagcgcggatttcgtcattctgggacacggaggcattggccaggtttgaataaaccgcggcgccgtatccgcgggtgcccacggggagcagcgcgtcggaaaggggatttagcaggtgctgaaccaggccgaatggagtgccgtctccaacggtagaattttggactgagttaacggcctccgagattcgggttccgagctggatatgagcctgctccagctggtcctggcgaagggtgagcggcgggggttcatggcgctgctcgaaagaagcatccgcgggatttttggggtcgaattggacattcaagactgtctgagagtagtcgatgaacagaacatagacatctttcgaaactgttgtcttgccactgcggttcgtggatgaagtctcctcgatctcgaaaagcagatcagtgcggttctggaaagccggaggcggggtgttcggtttagtccaccagagcgtatacgtggcgaaatcaacatcggtggcgatgtagccttggtcaatagatgggcgagtaacatccatagaccggcgaacgcttggctgatttcttagaagatccatagatccccgctgagttcgggctgcggacggggatggcaaacccgaagcctggctttggggaggctggggcgccagtgaaagacgcttctcattcaatgcagatggtctttcttttaccgggcttggcacgggaggtgcatcgtagagatcgtcatattcatcggccgcttgttgtggtgggacaggaggaggagcctctgggcgaccgagtgggacgggcggagatgtggggagaccatgccggggagcagagtaattgaaagggtcatactcagcatcatcatcgctggctggctccctgttcggtggaggaggcggcggtcccctaggtgtgtcgatagaagcacgggcattccggggcggctggcttggaggtggaggcggaactgccctgggagccgtgggtggaggaggcggtggatgccgagattcctgggggctgcgcggggactgaatggaatggtcgtcggtgataataccctcgtcaaagctggagtcacgctcgtgagccttcaaagcatccttgtgtttcacaccggatgcgatatcagtgtcgtagtctccatcatattcagtcacctctccttccgcttcttctccagcctgtcgaggagcagataacgcactcgtgcgactatcagcggtagatcggcgacgaagctggtcgggaggcgggggagggggagcgcggccctgcgacggtggtggcatgggcgggttgactggaatagggggtggtagacgactagctctcttttccgccgtaggggtcgcagccgtagaggacacgggttcatatgttgaggaacgacgagagtcaatctgatcaggtatcgcgggggcaggcactgccggtggaacagccgagttattcaatgacagattagatgtgtgcaccgacaattcatcatcagactcttcacccttgtcggcagttgtgggccgtggtggaggaggaactggtcggcctgcataaatcgtcaacgcccgcgtcaaatacttcgtttcgggatttgttaacatacctgcaggaactggcggaggggaagccggtggttcatcagggacagtcgggaccggtcttgactctcggggaggcggaggaggtgccgaacgatctgggattgtcaggaattgaaaccatgcattaggctactgaagaatatcttaccttgagatggtggaggcgggaccggacggtcaatagaggaacgaggcggtgcaccttcgtggacgacctcctccacgtctggcacctcgcgtgcagagtgttgctctgtgatcggagttgccgagggctcctcctcttctttctccacttcagtagaagaaggtaccggcttgctagccacgttcattccaggaagggggaccataggaactgggggcgcgttggcagcgtaagtgggctcagactcgagctctccaagctttttctctgagtcgccgggggtcttggccttgcgagaaataccggcaccagacatgcctgccatacctccggcaggcgggccgaatagacccatcatgcccattccgccgctcatcttggccattcgctcacgcagttccattctgcgcttggtctcaggatccatttcctcctcttcctcttcctctgcatcgccctcatcttcagcatctgcctccgcagtttgttcgactgcacgagttgacggttgacgctgggagactgggcgaggctgaggctgatcttcctcgtcatccttactggcggaggtttcgcccgcatcctcggagtctgcagcggcggagtagtcggcgtcattggcgtcactcgcaatttcttgagtgggcgagaatggggtagggggctgtggttgaggggccgcagccctcaatgtatcaacactaggatcccgagcagccgaggattcttcgacagagggagattcttgttcctcgtcgacgactgcgggagccacaggttcatccattgacttcttaggagggcgggacggtttctctttcttctgagctgcttccgcatgacgctgagcttgctccaattgctgcttctgaagcaaagcaattcggtctttcagactagttggcttgggctgatcctctgctccctcttcgccgccttcaacgggagcaggccggctttcagaaacaggaggctcgcgggtaatttgctccttcacatcgggatcctcctctcttttgtagatcttgggtgcaggttcccttggtggaggcttgtaggcgtcacggctaggaggtggcgcaacaaaaggcttcttgatgaaggatggctgggaaccgcccggtttgaatggcgtaactggtgctgctgcgggtttgttgaaggcggcgatacgatccctgaatgacgaacccgaaggcttctctgctacagcgggaggcgcgggttttggggcggccttggctgcgggttcagttggggccaccggaggggcgggagcaggagcaggcgcctttgccggctgcggaggcgaggatgcaacttctgctataggagcactcgcatgtgaaggaggagactggggcacaggtggctgcggtggtgtagcctcgtaatcttcctccgtgggctgcacttcgggctcgggctcgggctcagcttgcttgctttcgaccacgggggactccactggcgccgcctcaggttcctttttgggcctgggtcgagatggtctcggaggggcaggaggctcatatcgttcaacgaaattcttcgggaatatgccctcccgcttagttccctggcatctgagtattcaccgtagtaccaatcgtcgtcctcgagggcggtgacggtcacgatttgaccgatcgggaagttgaggtcatcatcgtggtccgaagaatactcgaagaccgagcggaccgtaaatggtggacttgacatctggcaagtcgagatggatgttcagaccttaggacaatcggtgtggagtgaggaatgctgaacgagtctgtgacgcaatgacgctagaatatctgtacagagcgaatcgccagctccaatacctttagcatgtagagatatttagagcgaaacgaatcaattcttttgtggtaccaaggcatgtcagcttagatgaaacggacgtcaatgggtgggtgcctacgaggagatgaggggggagaggggaacagtggaagcactcacggcgtggagaaccgaacaccctatccagggccagcaaagaatcgatgcaagaagaaaagaaagaagggaaaaaaatgaacacacggtcggaaagaccaaaaagtagtaggggaggaggatgtagtgaggtggtcgtcacttggcgggatgagggaaatgggctccactgggcgatcggcggctaacacatcaaccagggaacacgcacatggggggaaatgcccagctatttgaatatcaggagatattatactggttttagatgtagtcaaatttcttttcaagggagattaggtagcttggtatatgtagctaagtacccggacggctacagacgtcgaacttatataggtgaagaggaatattctacatacgtaaatcatgccgagtatacgttataccacatgtaggagtatatgatttatgtacgatctatgcgatccaagtatcaaagatgacctccggagctggatgcccagagcctacgtcagcagtgagctgtctctcctcccgttgggggtcaatccggggttttgcctcttccgctttgaacccgaattctgctggttttatatttttttttgcctatctggtctcgcttcacaactcaacccattttcaattcagattaccctctaggctatcttccagggcctcgattctaaatcatggcacagcaagggtcaagtcaccctctcaagacctctctccccgagacatacgccgccgtcaatgcccagcaacccccaccttcacacctataccctacacaagaagagcaagacagatacctagcaggtaggcctggtgcaacccagcagcacctcgaagttgccctgcaacacgcgcaacagattcagacccaaaaagacgccgaagatgccatcctaaaccgcatccttgagctcattgagctcccctcctccccgagcgcggaccctgccgcaccgtcccaagaagatactgtaaaactcaaatactcgctagcgccattccgccctagcgactacgacaatctaatcctggagcgaaacttcgaagacttgtgcgggtatgctctatgtcctcgcaagcatcgcaggcaagccaccggcccacgaggcggattccaatttaaatacggccccaaaggaagcgggccagggggacgtggacgcagcgtggatatcgtttcccaggaccgcattgaaaagtggtgctcagacgcatgcgcagagcgtgctctttggatcagggtgcagctatccgagaagcctgtgtgggaacgacgggcgggtgatacccggggcacgactattctactgctcgaggaagctcgcgccaagcgcttgaaggcaccagcggctactagcagtgtctcttccgttgtggatgatttgcagagcatgggacttgggaatcgcgatcggtccggggaacttgcgttggaacgcggcgataccagcttagttcgtccggatggacgtgttgacgtcaacatcagagaaaatcaaggtggttcccagcaggttgctggcgctccacagatgcgtccggaggatgcaaatggtggttccattgaaggatacgtgcccagggagcgacgaggcgcggaccaagatggagacatagatttgctcgatcagatctgatatagcaaagttgctatacgacttgcaaggggttttcggcgttctacatttcttaatacccggtcaatgttgccattgacacatgagtaatgaacaatctacgcagagaccatatatatggtatagtctggccaaaaggacttctacccacatagaatatgtaggtacaaacccagacatgactcagaccacccaaggtctcgagtctctcggactaaggtaaccccccagtccaagaactcctacgcagtcaaacctagagtaaactcataggtagacacgagaggaaaaatttggcaatcaagcgtcatctcctctcggagaatcagcgacacctttctcaaagagaatcatgtttattcattcctcatccaggaatagccctccacactaagctaaaccatgctagccgagcgaaaagccagccagaacagacattgtcggggtaccgccagggtcgaccaaaggtcaggtatgaacttttgttttttcgttattccgggcgcagatttagcggggaccgaaacgacgggggcgctcggcctgctgctgctggctgacagcaacaacgttgaccttgaggttgtcgaactataggagagatattagatagatgcaaaggtactggagagtgtagtgaaacttacgcccatggacttgaggaggtccttggtgtcggcgtcaacgtcgagctggccggactcggtctgggagacgtcgagagcggagacctcaggaacgtactgatccttgcgctcacgctcctcctcctgaagcttgaaggagataccgcggacgggaccacgctggatgcgcttcatcaagtgggtagtgtaaccagcgatctagaagaaactcggaatcagttggagatctcgagtgtcggcgccaattgattgaatctcaccttgttgcgaagacgcttggaggcaatgatggcgatctcatcacagatgcgcttgttggtctcgaagtcgagggtcaacttggggtagtaacgctcgatgatgaccttagcggagcgcttgactgtcttggtacggacgcgacccattttggcggttgttggctggcggaatgaatgttcgaaagatcgagagtagtcgtgccgatttgcgtgactttgagaagtcggcgttcgcttagtcttgtgcgggtccttgccctaggccctaatcaccaagtcacgtgccttactggtcttatttgattatgtaattatctgcgatatgaatccatggatcgcgcttgcccttttaggaaggtagcaagcataccaaaactacatgtacctaggtacatcctcaagtatgcgattattgaacttatttgtctcttattctcccttcggatggagaatgaacctttgcaatgatcgctgtgaaaataacttgatattgatgcatccgatttatatgacatagtcagaaaagaaaaatgaaagtagctttacacaagcaccaaatctatcatacatggtacaatccattgcacatccacccatacttattttccctatgacctggagttaaggttgttgagaaggctgcgagcgacgtcctccgtccctcttgtgggttgcctccggccccggttctcagtggaaggctggaaccgaggctggccgaatggctgtctgtccaatctagggactagcggggatggcgcagtggcaacatcggagatggtcaaggtactcggcttgtggtggtcttcgattccgtagggggctttggcagttgcactggcacgataagatgaaaggccaatgcggccgtcggagtcaaccgaagcccggatgggagtgacccagtatttacctccgccagggatggacgcatcgaagaaagttagaccggggggtgtgccttgctccacaaaggtcatggcattcaagtcttcgacggcaataccaccgatacctgccagggcccgagccatgcgtcccttaaagcgacccttagggcgcaagatgcgagcctccacagggcgctggtgggcttgtggaccaaactgggcatggttgtgaatcagagcgtgcgatcgtgtgtaggatagaccggcagacgggtgcgtcttcgggggtcctgagatggcgtattcgaatgaggacaacttgcttgcaggggattggtagtacttgcgcccgatacgctcgctggggacggcaggggaggaagcaaggtcaagtagctcaaagaccacagggccgagagcgaatgggtcattacgcagggttttgatgtagtcattgaactccgcatcggtgacagttgcgggatgagcttccaagtcttctccattatcctgcgcctgtttccggatttcagcagaccgcttagcgacaaactgttcacgaagcttctgcaggagctcaggcttattgcgagccacttgcttcaagtaagctgcgaactctgcctctgtctgcccagcaagccaaggaccggagtgtctgaattgtttaacgccaggttcctggagaccctggctggtctcggtgttatccaggtgcgtttcgaacggactttgatgccttggcacaacacttgtagcataattgactttggaggggagagacatcggcatgtgcagctcctggaacttctcgagggtcacagtgtggtctgcggcggattcgaagtcggtgacatgttcataggtatcgagagcgtgcaccctgacgacaggtcgcgatgatttctcagatgtcgacttagccggtaaaggtcgtttcaatccccaatcgcctcgggctagtgatgattgcggtgtaacgatggaggctcgaatagggtgaggcagagttgcggtgtcggattctctcactgtttggtcattgcggcgcttgagagttttagggagtgcgaacaagcgcgaatttcgcagcaagttcgccgttggcgatagcctggcggaggccatattgctcagtggattgactatgtgatcttgaacagctggcgcgagaaaagttgaccggagaacacgggccaaagcggtacggtgagccataactaccaaacccgcggttctgtatctatagaagacctcgggcatcaatttttgtcacgtagattgtcttcaattctgcaatgtaagattagggtggcgcttggcaaaatctattgcttaaaattactctggtcggccttactgtggaagaaaaaaggaattcttctatcacaaggtatcctttaattcaatccagatctatcagacaatgccgggtctaagcaccaacagctagaagagaatcaatggtgtctgagacagtctgcttcagtgggcggtacttgattccaaggatcttttgcgacttattgttgtcaatctcatagatgttttccgggaagtcgctggaagagtctgcagggggcagcttggactctaacttggggtgggtctcacgagccatatctgcaagttccttgtttgaaaagaagccagcgacgacaaagaacctctctcctcctgcttcaggaacttcgatggctctgacatgggcgagggccacatcacgcacatccacccacaagaaagtgcccgttggggctattttctccttcatttgaccctgaatgaggtttctcaggcgctggttcgaggtgttgagactctcaagggagttgagatagtgaacgattgggccaaacaccagtggtggattgatggtagcaatatcgaaattcggtttttccttttcgatgaacgtccatgctgctttttccgcaaaggtctagtatggtactgacttagtgcttgcacttactcaggctgaccggcaagtatcacataccttactacctcggtaaacttgggagtggtccattgcctcctcccatgtcaccggattccattctttctcgctgtagaccttggggtgctgcttgccgttcacaatagcagcaaaagatgacgtgattaccactcgcttcacggtaggggcgtactctttgattgccttcaagataccggtcgttcccttgatggctggatcaaggaagtctttcacaggatcctgaacattaaaatggaaaggagatgcggtgtggaggacatagtcaaagggagggtttgatttgacggcctgttatatttccattagtcggggtacttgttaggggaatgatatcccgctaacatcatcaaatgcaccgtccttcgctacatccttgacaatcacataagagagtttctccttcggtacgttggggtgtgcctcaataatccgcttgcccttctcctctgttcgaacagtaacaactgtatcaaaactagagtctgtcaatcaatgatatctatttttgtgttggcgaaatcatacccatgctgtagcagaatgtcgacaatgtgggcggcgatgaagccactgcctcctaaagtagataattagattgggctcgaaagcagattaaaatcacataccagtcaagagaactttgaccattatgagagataatatatgaagttattgatgtatgagacgttcaagaattaggatagataggcgaggaggttggcttttatggttcccctcgatcccgtcatcccccgcaatggcctattacgccctggaaagcttgaccagcgattacaaatgcaagctcggtgattaatggagttaagatatcaatgcaatttaaataaatccgcaccttcggaggaaagagctttagcctatgggtactcagtatatcttcttgtacaataagagagccctacatgattcatccaacctccctagacagtgttctctataactgtacagtagctattgaacccattgaacccattgaaccccatcaaattcgggataattagccccaggccctgggggctccttatatgcgtattctgacggtggaagcatgctctacatagtcttggcaaggaatgggatatcataagtcggtgaactatgcaaactagtatgttgatgtcccggttatatacccggtgggactcggtgcttcagagctttgatatctgcttggcatttcttgattcaaggtctgggaaataatacactagattagatgctcgcatctatgcctgtatcgatattgatatcttcaggctatctgagtcgtggatgtcaatggaccctttgagtgacgtatttgatgttggggataatatgatttcccaaacataccagaatccctcaaaatttggggttatccgtagtatactgtcaaggtcaataaatatcaagatagtgtgtagtgattgttaataagatggtcgagggtgccagcgtcacacggagtcgggaactccaaacttggcccgtgcacccctcgaccttctccaagcctcacacatgaccatccctctaccatccaactttatgcgctctgcgtcctattttatggcctagaccttgcattccaatgtccaccctggggcgtgattcgcaaatatggcccaagcaggtgcaatcacagacgtgacccaaagattgttcgtggagctcaagtcaaagaatgaggaggccagggccagagctgcctacgagctctacgataatgtcctatctgtgtccagaggtattaccggttgaactctgagacctctcactagctgacatatctccttgtgcagattggccctcggagaagttcgtggaattttacaacgccgttagccaacgcatcgcccaactcgtggtcaacggtagcgatgcaaacgaaagaatcggtggattgttagcactcgaccgactcattgactttgacggagttgatgccgcccagaaaacgacgagattcgccagttacttgcgcagcgcccttcgcagtaatgataatgtggtcctggtgtatgcggcccgatcgctgggccgactcgcgaagcccggcggggctctaaccgcggaactggtggaaagcgaaatacaatctgcattggaatggctacaatcggagcgacaggaaagtcggcggtttgcagcagtgcttgtgatccgggaactggccaagggctcaccaacactcctctacggcttcgttccgcaggtatttgagcttgtctgggttgcccttcgagatccgaaagtcctcatccgtgagactgccgccgaggccgtcggggaatgctttgagataattgtggctcgtgattctcaagtccgtcaatcatggtttgcacggatacacgatgaagcacttctgggcttgaagtcccataacattgattggatccacggctccattttgatcatcaaagagttgatcttgaagggcacgatgtttatgaaggaacattatcggaatgcttgcgaaatcatcctccgtctcaaggaccatcgtgacccaaagattcgcactgaagtcgtcctcaccatccccattctcgcctcatatgccccaaccgatttcactgagatctatctacacaaattcatggtctacctccaagcgcaactcaagagggacaaagagaggaactccgctttcattgccattggaaagattgccaatgcagtgggcaccgctatcggccaatacctcgatgggatcattatctacattcgagagggacttgcaatgaaggcgaggaatcgatcaggagttaacgaggccccaatgtttgaatgcatcagcatgctgtccctcgcagtgggacaagcgctcagcaaatacatggaagcgcttctggatcccatttttgcctgcgggctgagcaaatcactgacacaggctctggtcgacatggcccactacatccctcccatcaaacccatgatccaggaaaagcttcttgatatgctgagtatcatcctttgtggaacgccattccggccccttgggtgtcctgaaaaccgactacctcctatgccatcattcgcaaaagactttgctccccacgagcttcactccgattctgatatcgcattagcacttcatacgttaggaagctttgacttctctgggcacatactgaacgagttcgtgcgtgatgttgctatcaactacgtggaaaatgacaatcctgaaattcgaaaagcatcggctcttacatgctgccagctgttcgttcacgatccgatcatcaaccaaacaagcggacactccattcaggttgtcagcgaggttattgacaagctcttaaccgtgggtatcggagaccctgaccctgaaatccgacgcaccgttttgtggtcgttggaccgcaaatttgatcgtcacttggcacgaccagagaatattcgatgcctgttcttagccgtcaatgatgaggttttcgacgtcaaagaagccgcgatctgcatcatcggtcgactttctagcgttaaccctgcttatgtcttcccgccactacgaaaactgttggtcaatcttctcactggtcttggcttcgcgaataccgcccgccagaaggaggaaacagctcaactaatcagcttgtttgtctctaatgcgacgaaattgatcaggtcatacgttgatcccatggtgactgccttgttgcccaaatcaacagacattaatcccggcgttgctgccactactttgaaggctgtcggtgagctcgcaagtgtgggcgggcatgagatgagacaatatctgcctcaaatcatgccaattattctggactcgctccaggacctttcgtcgcataacaagcgtgaagctgcgcttcggacattgggacaattggccagcaattcaggctacgtcatcgagccatacatggaataccctcatcttctcgccgttctcatcaatatcatcaaaacggaacagacaggctctttacgcaaggagaccatcaaacttgtcggagtgctcggtgcgcttgatccctacaagtaccagcagatcagcgagattgaacctgatgttcaccatatcaacgaaatacagaatgtttccgatgttgccctcattatgcagggtctcacgccctccaatgaagagtattatcccactgtggtcatccatactttgatgcagaacattctacgtgagaactccctggctcaatatcactcagctgtcattgatgccatcgtcacaattttcaagactctgggcttgaagtgtgtcccgttccttggacaaattattccagggttcattctggttatcagaagcgctcctgctagccgccttgagtcctatttcaatcagatggcaatcttggtgaatatcgtgcgacaacatattcgcactttcctgccagagataatcgaggtcattaaagatttctgggatgcttcataccagatccaaggtaccattttatccttggtcgaggccattgctaggtcattggaaggagaattcaggaagtatcttgctggcctgattcctttgatgctcgatacacttgataaagacacctcacctcgtcgacagccctctgagaagattctccatgctcttttgattttcggctcaagcggagaggaatacatgcatctcatcattccttccattgttcgtctgtttgatcggccacagaatcctcagagcatccgtaaatccgctatcgatagcttgacaaaactatcgcgacaagttaacgtctctgactttgcatccctaatggttcattcattgtcccgagtcgtggctggcggtgatcgtgtgttgcgtcaagctgcgatggactgcatttgtgccctcattttccagctcggacaagacttcacgcattacattcatcttctaaacaaggtcctaaaaaccaaccagatcgcgcataccaactaccaaatcctggtgaccaaactccaaaagggcgacccgctcccgcaggacctcaatccggaagaggtctattctttccccaccgacgacaccaacttttccgaaattggacaaaagaagattgttgtgaaccagcaacatctcaagaacgcatgggatgcttcgcaaaagtccactcgtgacgattggcaggaatggatacgccgtttcagcattgagctgttgaaggaatcaccatctccggcattgcgtgcatgtgctagcttagctggtatctaccagcccctctcaagggatcttttcaatgctgctttcgtctcgtgctggactgagttgtatgatcaataccaagaagagctcgtccgctcaattgaaaaggcgcttacttctcctaacatctccccagagattttgcaaattctcctcaatctggccgaattcatggagcatgatgacaaggctcttcccatcgacatccgcacacttggaaaatatgctgcaaagtgtcatgcttttgctaaagctcttcactacaaagaactggagttcgaacaagaccagaactcgggtgcagttgaagccttgattaccattaacaaccagcttcagcagtccgatgccgccatcggtatccttcgcaaagcgcaggcgtatcgtgatgtggagctcaaggaaacttggttcgagaagctccaacggtgggacgaagcccttgctgcttacaagcgacgtgagaagacggacccagactcatttggtatcaccatgggtaagatgcgctgtttgcacgctcttggcgagtggaaggttctctcggatctcgctcaagaaaagtggaaccaagcgtcactggagcaccgccgcgctattgcacctcttgccgctgccgctgcctggggtcggggccaatgggagttgatggactcttaccttggtgtcatgaaagagcagtctccggaccgttctttcttcggtgccattctggcaatccatcggaaccaattcgatgaggccaacatgtacattgagaaggctcgcaatggtctcgatactgaattgtctgctcttctgggagagtcatacaaccgtgcctacaatgttgttgtccgggtccagatgctcgccgagctagaagagatcatcacatacaagcaaaacatcggcgaccctgaaaagcaggatgccatgcgtaaaacttggaatcaaagactgcttggatgtcagcaaaacgtggaagtgtggcagcgtatgctcaaggtcagagctcttgtcacagccccgcgtgagaatcttgatatgtccatcaagttcgccaatctttgtcgcaagtccaatcgcatgggtcttgcggaacggtcccttgcatctctagagacagtggtgtccgatgccaatggcacgcgcactatcgcaccacccgaagtcacatacgccaggctgaaattcagttgggcaaatggtcaccaactagagtcacttgaaatgatgaaggagtttacctctggtctgacagatgatttctccagatacaacacactcatggtatcaaatggtgaacatcatggcgcgaatggagtcaacggggtcgttgaccagaaccacccagatgccatcagcctgaatgaacggatcggcgacgtcaacaaatttagaaaacttctctccaagagctatcttagacagggagagtggcagaccgctttgcagaggggtgactggagaccggaacatgttcgagaggttctcaacgcctactcggccgcgacccaatacaaccgcgattcatacaaggcgtggcactcctgggcacttgcaaacttcgaggttgttacaacgattgccaaccaggctagtcgtgagggcatacctgcgccggttcctgctcatatcgtgacagaacatgtgattcctgccattcgcggattcattcgctccatcgctttgtccttgacatcttcgttgcaagataccttgagattactcactctgtggtttaatcatggcggagatcatgaggtaaacactgtcgttacggaaggatttacggctgtcaatatcgacacttggctcgctgtcactcctcaactgatcgctcgaatcaaccaacccaatatcagggtccgcggtgcggttcataggttgcttgccgaggttggcaaagcgcatcctcaagcccttgtgtatccactgacggtggcaatgaaatcgaatgtgactcgacgctctcaatctgctagcaacatcatggaaagtatgcggcaacatagcgccaaacttgttgagcaagcagatcttgtgagtcatgagcttatccgagttgcggtcttgtggcatgaactttggcatgaaggtctcgaagaagcgtctcgtctctatttcggcgatcacaatgttgaaggcatgttctcaacacttgcgcccttccatgatatgctagacaagggcgccgagacccttcgtgaggtgtcatttgcgcaagctttcggtcgtgaccttgctgaagccaagcattactgcatgatgtatcgcgaatcggaggaaatcggtgatctcaaccaagcttgggacttgtattacactgtgttccggaagatcagccgacagctaccacagctatcgactctcgatcttaaatacgtgtctcctcgactcaaggattgcgcagaccttgaccttgccgttccaggaacataccagagtggcaagccagttattcgaatcatgagcttcgacccgatcttgcatgttttgcagacaaagaaacgaccgcgtcgcatgacgcttaaaggcagcaacggtagctcttacatgtaccttgtcaagggccatgaagatatccgacaagatgagcgagtcatgcaacttttcggcttgtgtaataccttgctggataacgatggcgagagtttcaagcggcacttgtcggtccagcgtttccctgccattccattgtctcagagctctggtctcctgggatgggtgtccaacagtgatacattgcatgccttgatcaaggaataccgtgaaagccggagaatcctactcaacatcgagcatcggatcatgcttcaaatggcacccgactacgatagccttactctcatgcagaaggtcgaagtattcggttacgctatggacaacacgaccggcaaagatctgtaccgcgtgctatggcttaagagcaagagctctgaggcatggcttgaacgtcgtacgaactacactcgatcgctcggtgttatgtctatggtcggctacatccttggtctgggagacaggcatccatcgaacttgctgctggatcgtggtaatggccgtgtggttcatatcgactttggtgattgtttcgagatcgcaatgcaccgagagaaatacccagagcgagttccgttccgacttactcgcatgttgacgttcgccatggaagtcagcaacattgagggtagctaccgtatcacttgcgaggctgtcatgcgtgttctacgagagcacaaggattccctgatggcagttttggaggctgtaagtgacctgattccttgaaatactataatcacactcactaacttttttttctagttcatccacgaccctctaatcaactggcgtctgggtacacaagagtctcccgaccgagtgtctctcactgcggatcgccgccagtccatcatggacggtgtcaatttcgaacccggcgcccagccgcccggcgattattcgcgtcgccgccgcccatccatgcttgaaggtggtatcctcgacgccccggaaggcgttccacaagaagcccgcgaggcacagaatgcccgtgctctccaggttctcgcccgagtcaaggagaagctcactggacgagacttcagaaataacgaagagctgagtgtcagcgaccaggtggacaagctcattgcgcaggcaaccaatgttgagaatatctgtcaacactggattggatggtgtagtttctggtaatctggctttgctcttggagttctacggcgacgatgatatgatatgatgcgttttgtttcgattcctcttgtatttagagttaaacccagtcatcttctatttttttgttcttatttttaacttcttcttctgcacctctaatgcttcttcatggttaattccactcgcttggtagtaattttgaggttgtatgaatagagaaaatccccattgcattattccattttattttacatactcacctaacaaatgaggtctataaatcacttgggtaatcttggagaaaagaaaaaaaagtgttatcgtgataatggataacacgtgaccggtggcgattgaggcttaggtcccgacgattcaccttcggacatagcaactcctcataccaaccttttttttgtttcgttcttcgcatttccaggcataatgggtggagatttgaacctgaagaagtaagtactgagccccagcttcagtatctaccctaagagtagcatgacactaaccgtccgaccaggtcatggcatccaggcttgctcaagaaccaggagcgcgtatggctggaggagaagcgcgctctcgaagagcgcaaacagatcgcgcaactacagcgtgaacgagaggaagagcgccagatggaggagatccagcgccttcaagaagccgccggaaagacaaagcaacaccgccgggtcgactggatgtaccaggcaccctcgaccgagaccgggcactactcggaggagatggagggctatcttctgggaaagcgccgtatcgatggagttctcctgaagaacgaccctgacactaagaaactggagaagggttcggaggtggtgggcaatggtgccgcggctggtccttctattgcctcggcgcgcgacaccatgtcgaaggttatggcagaccccctactcgaagtgaagaagagggaacaggcggcttatgaggccatggtgaaagagacgctcagacgcaaggaaagagagaaggaacgcggagatcgcgatcgggggaaggatcgtgaccgtcgccatcgtacccacgactcaaagcgcaggcgctatagtgatgatgctggtgatgaccgccgtgaccgccaccaccgaagatcttcccctcgacgacaccgatctagatcacccgcttcgcccgatcggtcttcgcgcagataccgaagtgaccgtgatcgtggacgccgcgacgacgaacaccgctcagacagccgtgatcgccggagggacgagcaccgatctcgccgggatgatagggaccggggccgagaccgtcgcgactaccaagacaagagagactcctattccagccgacaccacgatcgcgaagacagaggtgtgcgggaccgctcactatcccgatctcctcgcccatctagcgatcgtaaagaacgtcctggcgcagacgaagatcgccgtcgtgacttcccccggcgcgaatacaataatcggcgtgactcgggacgggccatggggccacccacgcgtaccccaaccaacaagcccgatcccaaggaaatggaagaagaacgccgccgcaagttggcagagatgcaatctaatgcctcagaaattgaatcagagcgacagcgccgaatcgcagagatctctgccaaggaggaacagcagcgggaggctgatgatcggcagcgttcagaccggggccggttcatgtctgatgtcaataagcgagtacaggaagatactctggatgaacgtattcggcgtagccgtggtggtcttgcgaagatggaggaggattaagactgtcgtggtttctacgtgggactaggcatttgctgttacttcgggttctatctgcatgatttcttgttctcttttagcgttatgggaagttttgataccaagtcattgatatccattattcaaacctttcagtctcctgcaagtgtctgtattgcagtcttgaatcaaattcttcttcagaggttctggtgagatacggcaatgcatagattgcatggttttacttgttgagctgtatgtcatatacaatggaatggcaagactttatgggcatcatgcgcctggggcattaaagaaatgcaaaccctgcagatgctttgggatttccatggccgcacataatagattttccatcaagcacccctttactccagcatctctaccaccggagagtcctgttggagtagacaggatttaatacgcactaggcctcaatatataagtcgtttccgaactgctccagattccgtctatgagcacggacttaaacgcatgtatcgatcacagtggggacgagcgttagttgacttcttcctgtggtaaacggtacgagtacgagcatatatgaatgtccagatcaggctacagcttggcgatgaaacattggcagggtgagcttagaatttttaattacgaggataatggtgtccgcttgcccttcaggggtaatattctcaatagaatagcaattgtctggcttgggataggggagaggtttatcagaatgttcaggaaaagaccccagggacaaggaacgaagcctcatacatataaacgttccaagtcctcgttagtatttcacataaaccgtagcacgagtgcttttaccattacttcattgtatctactccgtagtatatcagaaattacgagcctcgcagaatctgaggcggttggttgcgaaaggtccaaaactcgttcaatatatctaccagaagaacgacagattgaagaacggcaatggaaatatgcaaaaaccagaaggcagaaggcagaaggatcgacagcagaccgttacctacgtcagaaggctatggtccaagttggataatgttgatcggtagtccatatgtagccattgatacgagtacgaatcatctcgtaggactaattcgtaatgtccaagacaaggagaaaaaatgatgacatgaaaggcattaccatgactttaattggttccaggtatcccgtgggttgcctaggtagtatataagtttcgctatattccggacaacatcgatccagccctctgaacattcccttgctctagtgtcccaccgagacccgcaatatgaagttctatggtgttgctatcgcgtttaccttgtccgtggctactgcatcccctggtgcaggatggaagcatgccctccaatggaaacctgctggagaatctgattgtaccgtggccctaaggtgttcttgtcgtgttaagagactaatattttgaaagaccgaggtccttgtcccatgatgaataccctggcaaatcacggattccttccacacgatggcagaaatattacacgaccgaatttggtcgatgcccttggtcaagctctcaatttcaatggcaccctggcgagcttgatgttcgatatgggggttgtagctaaccccgagccaaatgctaccgtcttcactctgtaagcactaaatccgtgtgagagtccttccttacctggactgttcttcggccaacgattcgagatacctttttctttctcatgagccagagattactcgactctttgctgatcaattttgctccagggatgatctcaaccgtcacaatgtcttggaacacgatgctagcctgaggtgagttgacacttccattcaacacattctccatacaatgtgaatgagtactgacacaagtatacagtcgctccgatgcattcttcggaagtaaccacgtctttaacgagactatattcgaagagaccaaggcttactggactggacctatcctcgacgcagaaatgctggcgaacagcaaagttgcgcgccagatcaattctaaagcacacaatcctacctatacctttaccgcaaataccgaacaatttagcttgggagaagtcgccgctccaattattgcattcggcgatatacaagcagggaccgtcaacaggagcctcgttgaatatttctttggtaagttgaccaactcagatcctacgcggtggtgcctaattccgaacgtctcaacccatagagaacgagcgtcttcctaccgacttgggctggaagagacctgcaaaggttacaagtttacaggacatcttgagtgtgacacagatgataaagaaagccagccggctaatcaccccgtcggagtcttctccggcacgccatcaaggatcttctcaagtcaacttgcacggctaaatttatctcattgacatattgttgagaggggtgctgaaggatctcatgattgccggatttgtcagggaggtagtcttatatagatggtcaactagatggatctaggagatggtctcctaaggaatacaactattttcccccttgattgattgtatatcgggtccgagggcgttaacgctgtcaacagatctttctagaccactttggcagagcgtataacgacaattgaacaaataaggacgttttccattttttacagcgaatatatatctagctctccattagaacttcagattgatcgcttcccgtaccccaaacttgctgaaccggccattccagataatgctgccaatccggcggtagtaatcgctgaatgtcttgcaagacaatactcccccaaggtcccacgcaccaattttcccgagccatatggaggaacccgcagtagtgggccagcacgatcaaagcgaacgggtgtccgttattgagatcatggagaaaatgcttggaagctcgaatagcgaaccccccaatgagagtcatcgattgaggttctactagggtaaaagccgagagactgcggagatgggcaatatcccgctcatagattgcagtatcgtggtggacaaactgctgtccacattggacgttcagctcctcgagacgacgaaaagcatcaacaatatcctccggccaggtcagttctgggggcgagatattgaacagtggtgcaaaattgcttttaagtagaaactgttgctgctggctagaaattgtctgcactccacgggcaagtgtgaatatatcaatcaaagaggctaagctgggaccgtcaggggagccaggagtcagagagcttccgaacctaaatgccacaacgagaccggcaaagctcatcattgctttggcattcgactggtcgatgttagaaagttgctcggagaagatggagagtgcgacgtttttgtgggagatggcaatgctcaaccacttcgttcgagacttttcgtctcgtaatcgcgacagatgcagcgcagatagacccaggatcccgtgcatgaggaatggcgcgtgaagggcctcctgtaacacttgcacctcccagactttacgcgtctcttcgttgcgagcaagtaactggtgggtttcggtaatccactgcagttctagttctagttgttccatattcagcgtaggaacaactgaggatgtttgcgcagcacctaggtggccctcagtggctgatacactcgccaagaacggatcggcattctgctccgcgatcgaggactgtctcgtccgtttggattttcgctgtttcccagcgaagaagtagggcccttcggtgctgtagacacattcttgctttcgctgaacgcagtttgtgcagtgcggccgttcctcgccacactggttcagagttaggacggagtgttaatagggagttggtaggacacaccttgactctcctctgcttgcaattactacacccatggcgggatttggcatgtgatcgccgataaaccattctcgtgagtgtttacgaatctgacaaatctggcacgcggactctctacctaggtagcgtccaaggttacagacaagagattcaaggcggccttgatgccccaccgaaggggctattaccacgcccacctatccaggggatacgcacagtttgaacaatcttcccaggtgaacttgaaaactgggtggcaaagactgttggagtggttagagaccaggccaatgtccggaatagacgaaggatacgagtacgagactcaggtctgggctatattagtactaggcagatatctgcgggctgccaaggcacatacctttctgtttctgatcttcctttgaaggggaatagcactagtttatgtgccgagatcttgttccacttcaaacgcgttcataggatgatgtcggctaactatgccaggttatcgtgatgtccctccgtaatcctgcatatttaggaatggcttggtcgaccatccatcaaaattcaagcgttcgagaaattccacctttcagctaccggacgtactcgggataataagaggcaatcgtcagcaatatcttatgattatattgcgaggcaagcagacttctatcaagtcatgccagaatatatttcgtgatagttgatccgatgtgacttacggaaagggcactattgagtatctcgtgctgccgtgcatgtgcattatctatatgaccttctaaagggttaaaaaggagagcccgtgtcagcctgagaatgtatagaagggacggtgtaggtttcatgcatatatgtacataatcctccaaggtcggaccagaaacctcaagagtaattttgagcttggctttattgcgcgtttaccatcagctaacgccaagcaggtcaatactgattaatcggtatgctaaacaaccttggacaatatagaattgttatagtacaaccaactcgccgtcggacgacgaaagttaaaacggaaatagactagagcttcatcatccatctcgaagacaatattatggaatatgttacctgctacggcgggtcttactttaacaaaggagtgcattcaacgaacaaactaatacatgtatatccccagggctactctctatggcaaaggagctgttcaaacaatgcactccgtgttctgaccacatcccgatgacatcatctgcaataaagcgtgggttattgtcgctgtacacgttcacaggccaccggaacgctgatgagaaaatgtaccggaagtagtattctacctcgtcactccccgcgttgtaatggcgcagacactggcaaatcgggggtaatccacaaccaccagggcgtactatactcctgtctcggattctgatatgattgggccgagcaggcttcttcctttttgttcctttttactcctttttactccttcaagcacatgcccttccattttgtctgcagatacgcgactctggtaaagaatgaaatgaagaaaacacaacgtagggccagcaagcatcttcatttcttcatttctcttccttcgtagtattcaggctgaagatggacctgaattcgaggcagtgcgctaatgtcgccaatgacaaccgctaggccaaatgcccgccttttcccgcttgttaactgttagtacatccgccaagacaggtctcgacagtctgtatcaggaatgacttaccagctatgagaggagcttgggccatgctggtggtatggcggctggtattcgtggctaggatatgtccggtggtgggcacaaaacataggtcgaattttgctcgctcatcacagagaattgtccggggtatacacgtccctattcgtctatgcagtaccagagcaatgaaataacggagcggtaggtgacagcaacatgagaaataaagaactgggaggaagtgagagtgaagagagataacagcgagagcggtctcttcttgggaaaggtatcgtggataacgaggtgacctacctctgcagcagtcacatcccaaatcaatacaacctttcctcaagaacaggtgtatgaattttctgaaggggcaatgcacattgtgttcagggctgttgactcgaatgccggcagttgagttcagtgctgtatgactaggaatgtttcaacatgtaacaaaaacagctatcatcattagtatatatgctaacgatctagcagacgcagcgcaaacggcaaattacgcgagtagtagatgtccacgggtccacggaagctttcaaggtcactacttttattctaagggctccttcctcgagttgaaagacacagaggctctttcccaaattgatataacccgattaggaaggtcgagaccctatcaggttagagttgtttacctgaccaggtgcggagggctatctcttagttttttaaatatgagagagtcacaccttccataaaacagcaaggtaagcctcaatctcaagcatcaacaccaatggtccactccaggtccctggatttggctcttgaactacgagctcactggtacacacgtaccctacttaatggcgtttatatctttctcaatcctttactgtcttcctttttacgactcttttgagcgatccatacatatgtagctagtggattctcacatctccttgcccccgtatcctcagtccctgttggagattgccatgagttgataactaaagctgataactaaagcaataaacactccagctactccaactaatcattcagccacggatcctggagtagatcctttgcggtcttcctatcttcaggccgccactgaagcatccctctcatgaaagctatgaacatctccttatttctcccttcaaggaacacttccgactgctccaaactgacccctgtcgggatctctatgtcttgcttccattttccttttaggtttgtcttcgtaagtctttgaaaagtgcattaagcgagaaaaggatacttaccatcattggtgaagaattcatggctccgttttccacgctgaagcatatctaaagggggtggccctagactacccatgacttctgcaagatgcgcccgggtcgagtaccctttgccatcagggtcatttccatggaaaaggtgtctaccctcaaacaaatcccacacctattattcctgaatggttagtacacgatattgagagtgaaaagagtgaacagggaaagcataccataacaccaacattccatatgtcaaccgggtagctccaatcagtcttcagcatcacctctggcggcctataaacatctggctgtgcatcgtgattcctcttctcatctccttgtacggcagagccaaaatcgcttaaaactgctcggccaaataccttcggcaaatcgaaacatcgggaagcataaactggcaagccattgacgattttgcggtgtgaagggctctccagctcagcttgggtaaaactttcaaggatggacttgtcttctatttcttgaagaatattatcgcttttaatgtctgcaagaatgcatattagggcaatgcctttcgaaaaagccttattgatacgacttaccggtgtggacaagcttgcattcagtgtgcaggtagtcaagtgcaagaaatatctgcataagacctggtttgaggagatcttcggtaaatcgatggttgggattgcggtacagaaggtctctgaaactcccccacatcgggttctgaacgagacacggatggttgccgcccgaagagggaattgtgaagatatccagtgctttccttacatgagcatggccaggatgccatgaacgcccttggtttaattgcttataaacctcaaactcatcctggttatcttcgtcacgagtgtagatcttgagagtcacatatcgatgacctctgatttgtttcagtgagtcagtgtatagttaaaataagtagacctattctggcttactcaagatcacgagcgagccatacagtagaagtagtcccaaaaccaagtttaccaacaatctggtatttggaaacaaggacgtcgccaatattagcaggataatattgtccttgtttgaactttttaaaccgttcctcatcaagcacctcggagggacggacggtatcgaacccactggtgggaaagcacatgggaggccagggggctctccggaacgcctttgtggcccatttcatgatcgtagccatcctgacggtgtagaaggagaagacggtggcacaggaagaatgcagaatgaagatagttaactatctacgtaagtaaatatctagatatttccaataacacctgggcaagggggatgatgtctcatcctcctggcccggggcaccatcccccagctcatatatatgacattcgaatatatcgagggacgactggcggacagttgacagacgccaagttaaggaaggtcactaatccgtgtgcgagacgggatctcgggaggtccacgggtccatccatccatggatagatgcccaggtgctacctaggtgggtaaaataggaaaataagtaacgtcagcactagaacagcagggcagcggcggctggatgtccaagttacgggtggaaaggaaaggcagccaattcggcctcaagagcggtcattttcgacgccggcgtcaattccacaggtcctcatattttaggtataattatctatctttccaggaagcagaatgcagtatgatgtacataaataatagagaaaaggaagaaacagtaaataccatctctcttatttctccaaggggcagattcttaatcactgacatcgaaactcgtcccacaaccgcagttacttgttgcacgggggttatccacaatcttgaactggctcccgatcagctcggtagtatagtccacggtactgccatgcagcagctcgagcgaaggctcatccatgacgaccttggcctcgccagatgactctgttgcagcttcatccgcttctccttcaaacacagtatcctcttccgggtcaatcttggaagccccctctagggacatcatatactggaagccatggcacccgccgctggttactgtgatgcgaagatggtggtacggattctcttccttgatggcggagggagaagtggttgggtctgtgatttcgcggagacgctgcgctgggttagcttggtagttcacagagatagagaaacccaaacggagggagaaggcaaaaataaaaagtgataaaaataaaaacatgcaacagtgaggattcgctggtggtcacccacccaactactaactcaccggcgtgtggcttaagtacggctgagcggacgggaagccctgttttccacaccctatggtcgcatgtacttggaagagcatgtgaagggctcaaggcgcggacacatggttgtcccatgccgactgaaagcgagccgacacaagagacaaaccccggtactcggcacttgatgtttatgcagcccaaacaacttcccgccggtcacagcacaagccacatagaagaatgaagcaaacgcagacaaaacataagcaaaagaaatcctttatcaactcacctccacagctcgtggtgaaataccaatcatgagggattgcccatcatctccggttctcgggttttgcgtcaccttcgcggcaggacgggcggacgaggaagaaaaactggcattttgctggcggatagagcgaggggttgaggattgaggtgctgagcgtttgagaggaagcgcactgcttgcggtagtgcttggccggcgaggaacgatttcgccgccggggaatgcggagaggcgcaaagccggtcgggaagttgagaagagccggcaagtctgtggttgggataaccggcggacggctgatgatgagaataaagagcgcgacattgctgatgtgtgaaagaatgaaatatgtcaagaggagaaaacagagagatgaagaacacctgataactaccaacatttgaaatcatcccattcccgattacatcgggttagtcagtttggcagtgacgccattggtcagataaagtcggagatttagggcagaataatgtccccatcaggaagtgatcggcggatggtgggggactgcagataaatgttcaaggttgtatgactctcttccggagctttggtctgctagagctctcagctttgcgaaatatacacccgaatcccccataactatccggttctaggtctgtcgtcatgggttcccggcagcatgttcgggacgtcaaaagcggctccccgctttcatatacagatgacatcagagcctacaagaaggagtatgccgaagctcttgatggtcaagatccgctccgtggattccgggatgagtttatcattccatccaagaaggatctcaagcggaagactctggcggtagatgacagtgcgtaccaaggtctcttgtatatccgggcagccgttctaatatttggcattcttccttctcgttaggcaatgaaacgtctgatgaaaaatgcatctacttctgtggtaactcactgggagtccagccccgtagtacccagaaatatatcgagcaatacttgcgaacttgggcaacaaaaggtgtgaccgggcactttgtaccgcatgatgatcaattgctgcctccttttgtcgacgttgacaccgccgcctccaagcttatggcctcagttgtcggtgcctctcaaagtgaagtggcagttatgggaaccttgactgccaatttgcacctgctaatggcaagcttctatcgcccaaccaaagagaagtataagattatactggagggcaaggcttttcccagtgaccatgtatgttgctcaattgtgcagtcgaactttgccctttgtcattggcactaatccgaatgcaattaagtatgcggtggagtctcagctccgccatcataacttcgatccgaaagacggcatggttttgattgaacccaaagatttagatcagcctaccctgaccacggaacagatcatcaaagcgatcgatgacaacgcttccagcaccgcactcgtcctcctctcggctattcagttctacacagggcagtacttcgacatagaacggatcacagctcacgcccactctaaaggcatcctgatcggctgggactgtgctcacgccaccggcaatgtggatttacgacttcacgattggaatgtggattttgcagcctggtgcaattacaagtacctcaacagcggaccgggcggaatagcaggactatttgtccatgaacgccacggctctgtggatgagaaacagcccgagaccgacgagacattccggcctcgactctcaggctggtggggtggagatatcaaaacacgcttcaacatggaaaacagtcagtatcttaatcggatgtacagataggcgagactgacgaccatagaattcctaccacaacccggtgccgctgggttccagctgtcgaatccctctgttctagatatcaatgcggtcgtcgcatctctcgaaatcttcaaccgggcaacaatgaaggagattcgacagaaatccctcaatctcacgggatatctagaacatctcctgacgaagtatcctctagacgctgccccggaagataaaccatttaccctcatcacgccatcaaacccagctgagcgaggtgcgcagctcagtctacgtctccagccagggttgctagatcacgttctgcattgtctggaggagaatggcgttgtgattgacgagaggaaaccggatgtagttcgcgtcgcccctgcacctttgtataacacttacacggaagtgtgggagttctgtcagatatttttgcaggcgtgcagagaagccgtgaaggcacgttgaccgttgtggtgtgttgtattaccatgtttcaactgcgtatatctagttttacctatacctatcaagaacctttattttgaatcgttgcttatttacaagctctcgggtcaggcatatctacaaattcaacggtatagtccgtaaaaagtagtgatcagccctataggtaaaagcttcggcttctcggcacgccttccagggttgttatctccgcaaatggcgatatggattgggtccttcccgcttacgtgctagcgagaaaaactcggagttgcaggtttctctgtgtttcctaggccttttttctcacctgttcggtttcgaaatggaccagagatggcggagaagcaaataaagcaaccatttgtttcgcacccggaatccggtcaagatgggactgcgggaacgaggagaggggaccttgctgatgtcgactactcagtcttcacagtcagtcagcgcaggtatattgtctttatggcctcttgggctgggttcttctcgcctgtctcttctcagatctacttccccgcattgaatacgttggcgaaagatctgcacgtatcaaattcgttgatcaatttgactttgacaagttatatggtaaggcttcgtacgtgtttaggacgttccattttatagtttggttaatgggaatgcagatttttcaaggcttgtcgcccatgtttattggtgactttgcggacaaagctggccgacgaccagcatatatcgtgtgtttcaccatctatatcgcagccaatattggacttgccctgcaaaacaattacgcagcgcttttcatcctccggtgcttgcaaagtgcagggagcagcacgaccattgccctctcatcgggagtggtctccgatgtagctacagcatcacaacgaggttcctacatgggactcgtcacagcgggctctctcatgggcccttcagttggaccagtaattggaggtctattgtctcaatatttgggctggcgggcgattttctggtttctgaccattttcgcagcggctttcatgattccctttctgctttacttcccggaaactgctcgtggtgttgtgggtgatggctcattgcctcctcagaaatggaatatgcccctgatcagctacctgaagtcccgaaaggctcgtgaggagggcgtcatatctacagcaactgcaccaaagcagaagctcaagtttcccaatcctctccagacgcttgccattgttttccagaaggataccagtctcattctcttctgcaatgctattctttttgctggattttatgacgtgagcgcaagcattccttctattttcaatgatctctatgggctagacgacctccaggttggtctgtgctatattccgtttggccttggtgcaaccatagcttccattgtcaatggcaagttcttggacttgaactatcgccgactcgcaaagcaattggacttcccactaaccaagaaccgtgaaactgacttgcggaatttccctattgaaaaagctcgcctgcagatcgcattccctcttctcgcactaggaagcatctccgtcctggcgtttgggtggtttttgaactatggcattcatctcgctgcgccaacgtgtattctgttcctcatggggttgacactgactggtgcattcaataccatcagtacactcttggtagacctatatccaacccaagcggccaaagccactgctgccaataatttgggccgttgcttactgggagccggcgcaacggcactcatcgatcctatgctttctgccatgggccggggctggtgtttcacattcatcgcgctggtgatgatggccacgacaccgctgcttttgatcgtgattcgaaaggggccggattggcgtgaagagcgtcgtctaaaagaggaagctaagaatactgggaacgggaatgctccaagaagccagaagtgaccagggggttattcctctgctaccgggtgaccataatgcactacatcttccctgtcgatacacttttagaaactgcgcctaagaaatgcatgattatagaactcttcaataaacaatacaagaaggcaaaggaccaacatgatcactggcatgataggctgttccacatcgaattatcatcaagatcccattgccaaaagcctctttcaaacatttatcctgtactccaagcctatggcatcacctgaaagcaaaatgagcccgctccaaaggctgccgttccgactcccatgccagccaatccgatctcgtagttctggacagatgttagcaaaatagttgttgtcaaaactgtagggcaagacttacggcaacaggcccatcgcattaaccttccagatacccaaacacagtaataccagctgcatcaacatgtagaccacctttactccaagcagacgcgaatgtgtcgatggggtgtcgtacttggcgaatgccgcattggtacctatcaggccctgtatgggacccttgaacagcataaggaccatcataatgctgaaaatctgaagactgttgccggacatgtacatcataatggcattcattgggatctgcttggacggggcgatggcgatctcccacgctttcttcatcttaagcgcatcggtctcctcgggtctcttcgtggtagcttgttgttgctgttgctggcgctgaaaagttccatattagtatgttcccttccctagtatcatgagttatgggtggaactcacctgcttgcctccgcgactgctcgagaagcctggcgggtccgggatgctagatgcggcctttgaggggcgaggcatcggggagttcaaggaaacaacccattgcggagggggaggaggtggtagacgagcttgtgacataattaagatagtaaatgtggtgtgtggggggagatgatcttagaagaaatgacggggaggaaagttgggtagggaggttccctccgcaagtggctacgccgccttcaattctcctttccttctctctctctctctttttatttcccacttcagttagccttctgattctttttcccaactgtctgagaaaggacaatgtccaatcgctgatccaatttgtctccgagcatccgaacggtgaacacgtcctcggtctcacccttttcctctctcaaaactccccgacgacccggaccctttagacttgatttcacgcgctttacgttcgttctatcctcgacgatcctccagccaagctcgactgtgattgatcgcacggttgtcagacacgacggagctcgcccgaagttcgcattccaagaaatcgcgcctagcagtgcctaatcgctattcgtccataccgcagccatgagttctggaggagatgcgaagttattcgccagggtacgttagctcgcccagcctgttctctgattgcatgatatatccaacgtcgcataatattcatttccccccttccccgcattctacttccatgtattcgcttcccctcgctttggtgagctctgtactcgggcttttgcatcttgcttggttcccttgcatccggcataggctattgttttgttcctacctcactccgaatcactccatcgtatctgccctcatgtttatcgctatatctccttatcctccattccatggctcacgctcacgaaatatacaggggaaggttgcggagttacggcaagagctcaatagcggcggcaaaaaagacaagaactattccgccaaaaagatcgcccttaagaagattgtcgccaatatgaccatgagcaacaacgacatggttgcgctgtttccagatgttattggttgtatgaacctgccgagcttggagatcaagaagatgtatgtccggaccatctactcaataatgctccttatggtgtgccatgcgggctagagcttgcttgctaatacgttgtgtaggtgcttcttgtttctggtcaattattcgagaatgaaaccagaggtcgcattgaaagcgctacccacattggttgatgtatggccccgctgttatgaaaggagattcgagttgtgctaactttgctacacaggatatggcagacaacaacccacttgtgcgcgcgcttgcgctgcgaaccatctcatatgtgcatgttcgtgaatttgtcgaagcgacgttccaacctgtcaagcgcctgatgcaagacaatgacccatatgtccgcaagacggctgctttctgtgttgcaaagctctatgagcacgataaaaagatggttgagaactcagatctaatcgacaggctcaaccgcatgttgaaggatgagaacccgactgttgtttctagcgtcttggcttcgttggtggatatctggggccgcagtgaatcgatttcactcactatcgactatgtcagtgcctcgaaattggtttcaatcctggcagactgctccgagtaagtatgttcggttccatatctggggacgtcgtgttaacagttcatacagatggtgtcaaacttacatcctcgaggcattaatggcatatgtgcctcaggattccgcggaggcgcttctgctggcagagcgaattgccccacgactgtcacactcaaattccgccgtcgtcctaacctcatgccgtgtcattctttatctcatgaactacattgcgggcgaaaagcatatcacgtcattatgcaagaagttatctccgccgctcgtcacattgctttccaagccgcccgaggtccagtatctggcactgcgcaatgctatcttaattcttcaaaagagaccggaggtcttgcggaatgatatccgagtgttcttctgcaattacaacgacccaatctacgtcaaagtcaccaagctggaattgatgttcatgctaaccacaaaagagaacatctccgtcgtgttggcagagctccgagagtaagaacttcacagattgacttgactgtatcagacgtgtactgacatcttccacagatatgccactgaaattgatgttcactttgtgcgcaaggccgtccgggccattggaaaattggcaatcaagattgaatcggctgcaaagcagtgtatcgaaacgctcttggagctggtcgatgccaagatcccatacattgtccaagaggcaacagttgtgattcgcaacatcttccgcaaataccccaaccagtacgaaagtataatcagccatgttatccgaaacatcgacgatctggatgagcctgaggccaaggcagccgtcatttggatcattggccagtatgcagaccgcatcgataactcggatggcctcctccaggattacttggccacattccacgacgaaacggtcgaagtgcagctggccctgctcacggctaccgtcaaacttttcatccaacgccccaccaagggccagcagctcgtaccacaagtactgaaatggtgcaccgaagaaacagatgaccctgatcttcgtgaccgtggttacatgtactggcgcttgttgtcgacagacccagcaaccgccaagcagattgtcatgggccaaaagcccccaatcacggccgagagcgaaaagctagacccacgcaccctcgaggaactgtgtctgaacgtcggcactctagccactgtttacctcaagcccatccaccaagtcttccgcgctgcccgccctcgacgtctcctgcccagcccagccttgcaacgttcccccgtcgacgacggcacaggaaatatgctcgaatacaaccctcccaccgcaaacatggcatccgcatcaaccagtaatagcggtctagccacaatcatcaccacaggtgatcccgtcacgccagtctacaatgggcctccaccttctctccccgtcggcccgggcgtcaaccccggaaccacaggtcccagcaacatgaatgaagcagcagatgcagcagacgcttacttcagtggtattggctcccagcaaatggcttcgatggaccttgatggtgccggtggtggaggtgcgcctcagactcagtacgttgtgactcaaaatcagcagcaggtgtatcagccacaactggctggtggagctgccacgggagagctattattgttatgatttagtttagagagggatgtatttgtacatgtagatagcagacgtttctcatgcggcctgcgcctagtaattacgaaatattttgatctgaatggagtttctagggtttctcattcacgccaagtccctatcccagagcaactcaggatttcgttttaagcagtcacagtggaagatatgaaatatgtagagtctttctcgttgatctaatgctttcatcaagtaactgtttttcttctacctgacacaaatactctccccatgctgtgttaaccatctgccttcaaagaagcagcgacagcagaccaggatgacacatgaaacagcggacgcccaccaaaaatatcgcgataatccaacttgaacttgattttgaacggaccaggaagccttgagcttccatgatccatggacggggaacactcgaaaaataaaaaaaattggaaaacaagacacagaaacatgaaacgtgagaaggggaaaggggagagcaatgagtataatatggaaaataaaaaacaaagtaggcagagaaaaagaaaattcatctcaagtcatgtccgttcctcttcttgtaagcagaaggcttcccaccattcgcttttttttctcttcaactctcggtacacttatgagacacgggccgcgtttagtagacgcgagcgaggttacgcaggtaccagtcgaccagacggcggccggccttggtctcgctgacgtggatcaggtcgtcctcaagagcgtagtcaagatcgttggcgatggcaggctcgccatccaggaggccaccgtcgacccagcggatctggcggctgcgctgcttgttaacgagcagccacgagcggagctgctcgggggacacctcgaggaaacctgcaagcttcttgaggtccatggtggtgtagagcttgaggtaagagcggatggtggggttgaacagggtgttcttgacctcgtccatgaagatggcggtgtggtggtcgacggggtcgacgttggaggcggggttgtcgaagtcgggaggagtggggttgatgaacttagggcaggaagagcggaagagctcctcgaagacgggcaaggcctcgggcccacccttctgcatgcggtagaattgctcgccgtacttctcgcggacggccgagtggatggtgtcatccagacgggtggggtggagagcgacacagatggcaatcagggcgtacatctggtcgttcttcttggcgatggcttcgtagttgttgccgcccttctggaagttctttgtccgagacacatacacgaggatgtggctgaacatgcggatggcgtcgccgtagcggcgcatcatcatgtaggagaagcccacgtagtagtaggtggtgaagtgggcggccatcacgcgggcgaacatggccttcttgttcatctcgacatcgtcgaggatcttcagggccagactgaagtcaccgagcaggcagtgcacgcgcagcagtccgatgatcgagaagtagccgagcatcttgtacaacgggcgcgagccgtactcgccggcgacagccattgggtcttctccccgcttagtggcgttcaattgctcgctgatctgcgagcgctggatgagagagtaaagcacgttcagcactgagtagcaaccccatgtgttcgggttttcgcggagcagctggctctcctcctcgttggatccagtgcaagcaacacggttgcggtaacggcagaaggattcgaattggtagatgaactcgtcaataacttcccaagcccagtagtactgattgtagagaagattatcgttagttttctgaattgtcatgagggatgaatcgacctgttgatttcacgaatgccaagcttttccttttcattcatggcgttcaacaatcggcgggcgaaacggggcacctacgttaggaacctccaaatccacggggccatcggagttcaggatatagtggaagagactgcagtagttgtcgtagctggcgaatttggtctcaagagtagcctggtattccagcggggtggcggcggcggccagctgggcctgaaggtcgtgggcctgggatgcaccgtgggacatggtctgatccagctcgctcattccatcgtcgaagttgacctgctcgcggtagtcgttgaccatagcctcctcctcattatcggactcatcgttcaagttggggcgcgcattggcgcggtcttcgtaggacatgttgagtatgagggggggaagaaaagagttaaaaatgcagcaagatgccgagatgaaacggcagtgaggaagcggaagggcgcggtggggagggggtgggatagcgtcggcgtgtgcgatttgccaaagaagtcgaattttgagggttttcgcttgggtgtttgtgcttatcttatctgcgcataagtattgtaatgactcagctgtgcgggttttgtgcacggtgcactcagtacggtggaagtacagggtactgagaccatcacctgttttggcgggaaattgttgtactgtgtacttccacttcgtatagacctcaacatcgatatagctttgcaactacctagctaggtaagtacataaatacctacatatataagtagatatttaataaatagaataaaggatttaatatccctgaagtgcacaacagaccgatggaagtgactctagacattctaaaccgaattggtactttttctggctggctgttccatgtcttgatataaaaagtgaccttgtataatatactcactgctccggccccttgttcaaagactgacgccagggtacactaggtttaattattcaaactatctacaaatctggtcaaagtgtatggtatttccaaatataaaagacagacgtaatagggcccaacggtgtcacagcagacagaggacggttggctttagcactttaccaggtcagttcagctcaatacccatttttgaactttctagaggaatgcgggaagttgagcgcttgaggcattctgtgtttctcgagtatgtgatttcattaactagccaggtgtgaaatatttagggaaaagacttccggtggatcagaggccagcaactggtcgcccgtcatcggctaacactattttgcagatgacagcccctacctgcccttctcctcagttaacgtcggcacttcttttccccttttccccctctcgctccaaggcacaggcggtgatgtctctagcccgagtgccgggaaggcagagattgcactggccattaccgaagagatgagtgggccagtgtccacgttttattctgccgtgacggttttataggatagcagcttttcctcagcgccctcgttccaagtccagccggcacaacacctcaaccgcggatttccaccttcgtttcatccgagtctgcagcaggatgaaatttcttccaatatcgtccatatggtagcggcatgggtgcattcatacagtcacaaacacaggggccatgttaattttcagggctcaagactcctccactgttccggatcgtcgaagattgcaataacctcagatggcaatcggacgccaaggtgcagcgcgttcttcctgatctcatgaatcatgtcggctgtttgcttaaatctgtgactaagagccgtcccaaaccgacacagctcagcgaacgcctgccttgattcgtcactttcttccagttgcggaaccaagatttgaagccccgtctgtatggcatcgactatctgactgggtatatgcttgaggccatatgactgacgatggatgcgaagacattgcgccgtttcctcgacagacttaacctggtagaaccgggcctgtcgaactgactgtggatgttgagggtcattcaaaatctcaaacagatgtatgatagcctgcagacattttattcttcgcgaggtatcagcacaggaacaaccactagggtgcatgcaacaggaagataataatgcttaccgcaagagaaggacttgtgggaccggatttggttgtatctcgggcacgctcggccagcgttgcagccaagcagtcaaacgatcgaatgggtcctgagcttttctccacaactcgtcaagattggtgccgcggcgtctttcagaaatgagtttttgggcatcgactaaggttctgctgagctcagcaagtccctccctgacttcagggagacgtgctggctttttgtcatatgtgattttgtttgagcgagggtacggtgtccagtcaaagtcttcgttgccacacagtgtgacatcggacgtgggatattctaagggagcaatcttctgcagctcaatcgacatttgtctacaccaattggttagacattgctcgtttgtgtaaggatgggcagcacttacgagctcatgttgaagacaccccaggcagtaatcgtacgaacacgttccatctctggcaacatcttcattttcgacactgctggggtatcaaagagtcctatatcctgtgccaaccgaacggcttggctaagcatcatccaacttttcttgactcgtccttggcatttaaatctgccaaaagtcaatatcgtggacatggctggtctgctacaaaccagtggataacatacacacagcacatcaagaggagagcctggatgttaggcaggtcgtggtcatcatcttcgacttcccacagtctttgtgcctcatggaaaaaattctggccgcgcgagaatacgttctcggggatggaaaaaacatcggggctatcagaataggtctatcggggttagctaatggtttcgcaggggggtatatttgcgagatccatacgctggccattgacaacaggctattgacgagaaggggcgtgcagaactccgaccttcggtcgccgagtttcatatgttgcaggaagatgcgctggtcaaggaactgcgtacatgggtggtcccaggtgaagtagagtgagactaggtgcgaaaccagataatcatcatctgtgacctttgtccagggctttgctggcacctcgaagagaggtatgtcacagaggctctccagtgtgacacgagcgtaagggctaactgtcggccattgcggaggtttcgtgtttggaatctcttctggtgagcttgctacattgccagggtccgacggccgtctcaccccgttgcccgaggtttctatgggattctccccatactctaaaatcgccaatttgctggcattggacaactcttgggggtcaccgaacgtcgtggccgggcttccgacagcatgggcgatatcttggaacggtgcctttttccgaatcaagtccatcactttgtcaaactggagctggtcaggcgacccgagggtgcttaacaaagactctagtagatctttgtggtttgtgagctcttggatcgtccgtttgacggcaacctttcgtctgaggtctcgactaggatcgaagtgacattcggtgttggtggaccgacaagccttgcacggggcatccggtccagaacactatattgagcgaaacacaacaattagccattttttctccaaaatctggcacaagccagaaaaagagagagaaagggaaagagaaaaaaaagaaatcaaccgatgcaccaactcaccttcctctttgctgccttgcatgccaggcaagccgtagaattcttctttggcctactgacagcggtcgtcgtctgcggggcgaacatgcgcggcggtcccggtgccagcgccggaaattgtttcgtgttctcgtgaggggtcatcttcattcccaaaaagatcagccttgcggacaatggttttcaaaacaaagttgtggttcgagattgctgaccgaaatataccgcggttgaagcttcggcaatgcgagtctgttgatgaagcaacgctgacttgatgtttcgagtggtgcgggcagacgatcttctatacagcactgaagcacggtcctaacgtttcctcttatgggccatcgaattcgacgtctccaacgtctcaccagtccgatgtcaggaagggggtaagtgtcatgtcgctatggtacgggcgtcacggtgcggtgcgttatttacgcatgagggtggggcacgactaaaagaaactattctggaatcggtggaaatgttcaaagtccacctgcaggtgacaatatcccaaaagcgagagggtcgcgttggcaaacagaaggggaggttcgacgcccgtcacacaaccggggtaacccggtaggccaagctcgaattcaacaatgattggagggctaacaaatccagcaacttatcaatacaagccgatgatatgcagcggatggcgaaggggccatcgagtagcctgagggatactgtcaagagatccgggagatcaaggaccgaatatggaaagcccggggccagcttgacccaaagcacgggatactcatccaaaaaagaatcaatggcgaatcagaaaaataatagaaaaaatgaaaagaaaaaaaatgaaaaaatgaaagaaaatggggaaaatcgaaaatcgaaaatggaaaaataattgagaaaaaaaaggcaccgtctagggatgtgtatcaatacgggggtacccaaaaagagaaatcttctaacatttgaatctagggagtgcgcaatcttctatggtatgtacggagtattggactatttcgatgtctttctcggaatacatgccgtcttagaatggtgtgatcttctttggtcttgttctactctaatgaccttgactatgacctttgactatgacctcgattctacttttccccctgtctgattctctcttggcaaaagactaggatcggggatgccgccacttcaaatctgtcaggtttcttggagactgaagccagatttgttatcttgtataggaaacccccatgtcaatcatatatacctccataacctccaccttttcttttcgccacttttcttcaggaactaattggggatgacatacaacatattacaagggcaaaactcacccccatgtcaatattgtatcctggtaagcatttgtggagaatatcattttactaaccagccacgctcacgcctgcagccttctaagatgggaatctcgatttcaacctgggcttggaaaaatgatccaaagggccagggttcgcatggaacaacatttccagcacaccggttgatgggatgggaccacgagatgtgctccagggctgctacggaggacggagtacacagtacacgctgtggatctccatacggagtagaatcttggaagcttgtcccgtcccaaagtcttttccgttgtggatcgaaccgggattttcaaccagagggaagacttcaggaacatcttcaatctcaccaaggaccgatcccctttagactcaaattataattcgatacttccctggatcctttattgcgtactccgtactccgtactccgtaacgacattcaccaaactctctcggcaaacccccttcggttttgatacatccccataacttcttccaacgtttctcattggcggttaaaacaacagccaatcggaatcactacaggaaatgcattttcctttcttggcattttgtcaatcactctgaatcgctctgaatatcaagcaactggcctggtttacattctttctggcgatgctgcactactgcactcggatgtcagacgtatctggccgtttgggagaaacttttcgttcgaatatctctattatatgtactgatatacgtacaagtatcgtatcttgtatattgtgtataccacactagtaagtagtactgacatatgggatacctttcccaaaacgacatctccccggcactcttcacccagattctcgggccgttccaactagtcttttcctagtgaggtccgcgcagaaagaaaaatttttttttttttttttttctttttatcaaaaaatgaaagaaaaagaaccgagaacggtcaagtaaactttccgactttgagcctagatgaactatgcatgctagcgtcgcatactgccgctcacgcgcccggtaaagtgaaaattaggataacggatcttttgttccgttcgtttatatcctatcgcttgaggttgtttaaatataacacatccatggatatatgtacttcgccccccgcacaagttccagtcctggttagataccgggaccagggagccagtgagatccgctatgcggctgagatcccctcttttttctcccgtgtcttgggcattgaattcccaacaatctttttttttttttcctgcaactaaaacacagtactccgtacagaaagttgtaaattggctgcgatgtaacgtggtctacaaatgtctatcacccgcatatgtgatgaaagccccctcgcctatctaggagatagcgcgaaaagactcctgccaatagtagagttagcgcgatgcaggacaagaaaacgcggttatcctatagttttgctgagacgctaacttagattgtaatgttctgggccagaccactttcaaacttcgagatttgcatatgcttatctatatttggttggaccttgtaccttgtatacaaaggatctgtagatctgtatctagattgatgtcatttactttctcactttctcactttctcattcggataaaatatagatctcctttggttggtcggatgtgttcaccgttagtggaccccgctttaactaggtttactatatttgtccagatgacattttgagatttccggctcatttcaactggcattttcatataattcatattataatctatattcatactatcgatagagtattgatagacccttcaattagccttttttataattcgaaccttttttctttcttttttcttttttcttcacttcagagaaccacggcccgtcaatgcattgcagctgtagcggggtatttaactaatctagaccccagtccttttttggcaaggattcgccttagtacaatatagttagtatttgcttttgttgtcccaataaacccagctcttgcatatctccacgggtggattggtttctgacacctgccattctacttcctacacagattacgcaggccatgtttgctatttcctttcttttttttctcgaaccacttacgatatttaggataagatcagccagctgcaagcactgcgagtcaaacaatactgcctgatcctatatgtcatattcctgctcagtgtttggttggctttcatttcgtggcaaaccccttgattccaacctggtcggttccgtatccaatcgtcggatcatcggactaccaacaagcgatgcttgcagcatatgcacatgttagcatccagtccgcattattggcttgaggtatgtcacatatcatggcagtgccatccttgaggttggtcgatcacgcctctatccgcttagattgtacacgcaggcctcgtggcggcgatatctgccgaccaattgctctggtgctagcagtctcagttttatcaaggtccccaatagatgtatttgttctttttgttgcatgttgtaggcaaacaacgaacccgacatccccatcattacttatgtgttgtatattgtatcctgggtcgatagtctatcttcttggcgcgtactagtcattgctcatgccatgttctttgcctttgcgctctgtcaccaatagtctgtcagtccccgacacaattagagtcgtagaactatccgtggcaagatcataggggtcagcgcgcatttgccttttcggttaagtataataaaaggtgtatccataggatataactataggaataatacagtagagatcttcccgcaactttttccatatcaacaagtctccaggattcgattagatgaaatgctgctcgaaatattaacgtccccgatcacgtcatctgcagtagctcttccatcaagcactatccattttacattccacccttcatagttcctataattgcattttcaccatggcgtctagctcttctgccttcctcgttctttattaaaggtagtaggatggatcttgggttttccatttgcggtgctgtctgtgagaaccctaattgaccaaaatacttatatctgtaggtctggaaggcctttctagcaagttcttcactactgctagtatgtccaagccatacacagacaggaaagaagtctgtcggcgattggtatttggtcttgtttggatgacttgtgacccggtcgtattttttagtcaatgtcaacgtcatccaaatcctcagttgagtcacattactaaactaaagcttctatcttaggacacacaaaataatgattaagtattcagaagagtttctatataccgcactgaggaccggaatgtctccgtattgcattctaattgcattatgaaggccacttgaccataccctgaaagagtcagctccacgttcaagataacgctctgcatagggccatgatttacagaagcttgcgtcgttgcataagaatcgccttagctagtgatcagcgttgcctccgtgcaaagatctccagcgtctcaataggatcgtccagccaagccttgcaagcattcatgttgatgacttccgtacaatgatgcgttagtaccggataccgataatggacagttatagtggccgtggcagtggcagtggctctgacttatttgaggaaatgagggaagcaacaccggctgaaagtctcgtctagcatgttgccagcagactgccgtggatgacagctggctcactgcagatatcatatgcggggtgcatgatcatggccgagcttttcccgttaagtttcgttgaatgacgcacggatatattctccggtccaaccagtgttaagagcatgaggacctggagtcggatggggctttggaatgaggggtcacggtgtacctaaccattgccccttacctaggtaggatgttaatgagtggcctttctctttgtatgagaatctgaccgccacgtgagtgaatagagtttggttgaatagagtttcacgggtaacgcatagatgttccaaggtctcgaaattgacatagaacaaagaaaggaaataaaggagatcaaactgggactcagtcctcttgtcttgtttgttttggaaccagtcgactagatatacaactattatatataatatagaaaggccaataaaacccaatgactatatgatatctatgctactcgatgttaagctgtatagttgattgtcggtggtctaattaaacagcttcttttaatcagtgcgatagtcgagcgagtttcaaggtggttgttcgctagttcgtcatgcggtgcggtatcattcagctacccaggattggtataggttggggtacaaagatcctgtattattttcgggtgttcgatgatgccttgtttttctatgcttgatcaattgcatatactatatatagttgtgtatcctgtagaacttaatatgcttcttgtacattacctaaagcagagcttgaggctgtgaaggatgcaaggattggacatactaaaaagccaagaccctcaacttagttacacaaatcagcaagatcttgcaaatcagtatgaacgataccctaagaatatgaaatcctagaacgtcaattgtggaagaccacacaatattgtaagtgaagtatatcgatatcaacgcggctagcctcggaaatgccacaagtgggccccgagatagccaatatttgacccctcaaagaattgctcatagtagagtccaacgtgagttttactagtagtcggaaagttgattggagtcctagagaaagcaatcccttttcaacatatccaacaaatgtttgtacaacgtgtgtgtaatgtgagcaatgtttctggtggcaaaatagagcgagccgacatccccgggaaccgttcggcgatagaaaacttttttttttcgggtcgacgatggttaagaggggcattccaaggttctccggggcaaaccgatttttttttataaagaacaatggggatccgttttcgtgaaatgcatattctaaaaaggtaggcccgttttagtctttttacccccttgagatcatccgttgaccgtcagtgactcacagaacctctcctcccccacattcaaggaaaagaaccttgatcataccaccatatcatcatgggttctgttgctgctaacgttgctgagctggacggctccaaattcaacatcactcgctctaccaacctacgcgatgtgcctttgcccggctccccagaggagctgagccactcccactgcactgaccacatggttaccgtgaaatggaccgcagccaacggctgggagacccccgaggtcaagccctaccagaacctcagcatcccgcccacggcatcggtgctgcactatgccaccgagtgcttcgagggcatgaaggtgtaccgcggatacgacggcaagctgcgcctgttccgccccgattgcaacggcgagcgtttgaactccagctcgcagcggtcctcgctgcccggattcaagtacgacgaggtgaagaagctggtcgccaagctgttgcagatcgacggccctcgtatgttccaatatcggcggcatttgcctacaatataaatgagagctattcactaacaatcatctttaggctggctccccaaccccggttctttcctctacatccgtcccaccgttatcggtaacggtccccacctcggcgtccaagtgcccaaggaagccctcctcttcattattgccgtcccatggcccgacttcacgaaaatgaagaaggaccccgaagccgagccccgcaagggtcttagactctacgcctcttcccccgataccatccgtgcctggcccggcggcttcggctacgccaagctcggtgcgaactacggtccttccctgcaggcccacggcaaggcccaggccctgggcttcgatcagatcctgtggctgttcggcccggaccgtcaggtcaccgaggctggcgccagtaacttctttattatctggcacaacaccgaaggcaagctggagcttgttactgctccactggagaaccagcttattctgcccggtgttacccgtcgcagcgttttggaactcgtgcgcgagcgtttgtcgcagaactttgttggcaagcttgcgccgcttgaggctgtggagcgcactttgaccattgatgatattgagaaggcctccaaggagggccgcattgttgagtcgttcgtttctggcactgctgtaagtttgataattgtctggttcttcgtcggagtccatatgctaacatcacacccatcagtacttcattactcctgttgccatgatccagaacgagaacaccgatatcaacaccttgggtgcgaatggcgagcctgctgggtatgctgcgcagatcaagtcgtggctcgaggctattatgttcggcaaggaagagcatgactgggcttacaccatcgagaacgaggaaaaatagatggacaaaacgttggtagatgattttagacttagactcgctgttcggttgatgcctcatgggcgggtttgtgaagcttagcatcgtcggtatctttgatgctagggttggactgtatatagattttagaccgcatttatagaataccggcctgtttcatttaatgtttgtcatttggctattaatatatttgcagaatgtaaacaagacgccagtaaatgcacctgagaactggatatcaaatagaaatcgtagcaattactttacatattctcatcagtgcgcagaaatagaaccaaattcgatgtcctaatctcgcatctcacatatcgacaatcatcggagcgtactctccagtctcatcgtcttcgtcattcccatcccagtccatttcgacctgctcaccatcctccaattggagcataccgcggcgaacgacagccccacgacgcagctcccagtcatattctgccttcacccattcttcaagcttgtcaagctccaacttcacttcggatccagtatcgacaacgaggtcatcgaccgactgacgaagcttcatgaggagattgcgcaagaacgccccgccctcatcaccatcaatctcaaacagtccaccatcaacatcgtcgcatcgctgcagctgcagcgatagtatccgaagaacttcactcataaacgcctctctatccaagattgcactccgggatgtaagaatcagctcaagaagccgcttccactgctgcaaacacgagtaattcatcatagttagcaccatgaggaacgtaaactgcagttctcccagcaactgattccccccagaagtctccccagcataccgatcgatcaagtctcccaaagcccaagatcgatccttcgcagcttccgtcctttcacgcccgacagcgccttctctccacgtccgcttcaaatcaacgggaatgaagccgaattcccgttccggttcctcgctcatttccggcccatgcaacgcttcagctggcgagtcgacgccgggaatatgatccgcgtcccggttggccgttgaagcagacgacaacacccatcgcggacgaccgtccacatcaatctccgggtccccaataacgcgcgatagaagagtcggtgagatccggtccgttagtccagaccaatccctccgcccgctctcttcggtttgcgcatcgtcttcggtctggatgcgagcttcgatttggggtttgggttggtcttcctcgttcttctcgtcttgttctgattccgtcgcgggcttgacaagcatagagggcgcaatccggctgcgatatttgaataaccctccactttgccacacagaacctagatttgctttgtagcgcatgctctcctggcgagcggagtcgctctcactgtccagtgctactagggactctgtgtttgcgtcccatttccatatgtagatctccgagcccagtgcggcttgggttccgtttttatttcggccttgcgggacgagcgctgtgtcgttgctacctttccctgcggtggtgatgtcaccgatatagaaccatgcaccgctgcgcagagagagcgtctctgttgcgccggtgtagaggaagtgccatcccggggaaaggtcgcggattccgtggaagttgggggttgatgtgaaggttatgaggtcgatgccgacgagcgtttttggaggaaggtctgggaggaggattgttggggttggctggtgggtggacattgtgcccgtgtgcggattcgagggctttgtgcttaggattgcgcacaggttggagctttgaggagggggaatttggaagcgattgcgtagtttggcccgagctgtcggataagcaccgttctatctttgattttttgatttttttattttttatggttatcccgaggtccgcaacccgacttagcttagatcttacctaggtatctacttagaacatcatagaattgcccaactatatccgttgtcaagctgtgttagttcattgcagtattatgaggaccaatctttgttttagagatataagaatctatggcctcaagcagctatatcaccaaggaagatacagaatcaaccttcctgtatcacaacactccatgctcctcccacatgccgggtttcgtaaatgtagatatgctacaactactatccctacgactgagctcatcaggagcttacaataacccaaaatatataggtaaagttgttgatttagcactacctaatccaacagcaacacccaagagagttgattttcagcgtatgaaaaaaattgaagaccaggcgatcaaggccgttcctcgcgtttattccatccacagatgcaggagaagcccgcaaatagcctccaatccagcgatgcaatgacttgcaaggggaagggaaaaaccaagcacacgctcacagacggcgaccacggcgaccacccttgcgacgggtagagtcggagggggtgggggtgacgtcctcaatgcgaccgatgcgcatgccggagcgggcaagggcacggagggcagactgggcaccgggaccgggggtcttggtgccgttaccaccagtggcacggatcttgatgtggagggcgttgatgccgagctccttgcagcggacagcgacgtcctgagcagccaacatggcggcgtagggggaagactcgtcacggtcagccttgaccttcataccaccggtgacacggcagatggtttcgcgaccactgtaataaaaaaaacttgtcagccaacatcatccttcatgttacgtttgtctcgactgcgctcgattccaactccaattgggtgattcgactccaattgggtgattcgaatgcgacagaattgcgggtgtggaggccgactcacgagagatcggtaacgtgaacgaaggtatcgttgaaggaggcgaagatgcgggcaacgccgaaaacgagcttgcctgcgtagcgttagacctcatgttttcccaacttcttcaactcgaattttgttcatgacataccatcaccggcgagagggccgagggagacgttctccttagcggcggcgggagccttggtcttgggggccattgcgactgttgttggtggttagtgtggatggaatacagagaagaaggaaaagtcggatctgatcccacctgggatgttgaaaaaagtgggtgtgtgccctaggaagaattacgcactctgattggttcgcaatatcaagcgagttggctgcctcaggctccaaggtgctacattatatccggatttctagtcggcccggtgggcggtgaagctcttagctccgctcagtatttaaatttttcgtttgcccaactgaattccttccgacattgcaattgatcttcccagccttgagcagcttagaagtttggaccccaaaacggttccaaacaacctctagtggttatcattgtcattggctttaagggccacaccttatttcccggaagttacaggcccgttcgtcgcgatgggtcgcaccaaagaagatgcctcgattggcatcattggtatgggcgacatgggcaagatgtatgcccaacgcctgagcgatgcaggatggaggtaactggccccttcttcgacaacacagttccgatatgcctcaaatggtaagcttttatcccatccttctttctctgcccatccccctcgaatgatgacatgagtgcatttggctcgagtatggtttggctggcgctgttacaccattctggttgatggctaaccagccggctgtcggtgatgttacacccacgctaccttaatttttatttgtctgatactgttcaacctcactctacataccttcacttttctgtttggaaacatacactaacaagtgaaaagattttacagattcgcattgggcctcataatacctaatattagacctgctaacttgcattttgatatcaaggataaacgcgtgtgacagacctgagaattttgaatctttaaaacaagagttcgcttctcaagtacgtcccccggctgggatcatgccactcaaagctcaagaagctcattgtatatatagaaaggagtcaccatattccccaatggacatctcgtgtcaagaattagcgattacattctgtacagtgtagaggctggagtcatcgataaggtcgtggcggagtacgggttatgtatgtgtcgaaccagggccctggtgcttctaaccaaagtacattctgactcggattcaagcaaccaaggtcggcgccatcgtcggtggtcaaacgtcctgcaaagctccagagctcgccgcattcgaaaaacacctgccccccgatgtagagattgtatcttgccattcgctacacggccccaaagtgaatccgcaaggtcagcctctggtatggcctacctcacgccttatactctctggaccatgcattagtaacagtgatctaggtcttcatccaacacagagcctctgatgacagcctcaaattcgttgaatccatcctctcctcgttcggctccaaacatgtccatctcaccggcgagatgcacgaccgcatcaccgcggatacacaggctgtcacccatgctgctttcctgagcatgggaaccgcctggcaggccaacaatcagttcccctgggagcatggacgatgggtgggcggtatcgagaatgtcaagatcaatatcaccttgcgcatctactcgaacaaatggcacgtctatgccggtctcgccatcctcaacccagcggcgaagcagcagattcgccagtacgccgagtctgtcactgacttgtacaaactgatgattggaggacagagggaggagctcaagcgtcgggttaaggctgcaggtgcatcagttttcagacctggctccgaaggacaagacctgttgttgaaggacgaggtactggatcggttctctctgtccaatcggccgcgtgagaaggcaccaccgaacagccatctcagtctgcttgctattgttgactgctggtcgaaactcgggattgtcccttatgatcatatgatctgttccacaccggtgtgtatccagtcatggagaggatattgccagattgtggttatattaacatcgtgcagcttttccgtctctggttgggtgtgaccgaatacttgttccgcaaccaggacctcctcgatgaggcactggataccgcaattgatgacaagaccttccgctcggatgatttggaattcacgtttgctgcaagggtatgttttggacagtgtccccggcgcctgtaggcgtgtaggatttgcagtcaatgctaacatgatgctttcaccaggcatggtctgactgtgtttctttcggtgactttgagtcctaccgacaccggtttgagcggattgcggagtacttcgcaccgcgtttccccgaagctgccacgcttggcaatgagatgatgaagaccatcctggagaagaccacctccaataactaacgaactgataacggcgtgagatacctacatgtaggtactcccgtgggtgcatttttatcagtatgagcaagactggaaaggaaggtcgagataccaagtagctttaacagaatgtatgatcctgggattccattgtaaattaaatcaaaatcaattgaatgataactgttcttcaataaaagagtaaacctcagcaggaacactttgcttttcattcatggcatggtgttgacttgagggctggagcgataagattccttagtcagcagtttgtttctccagatctggttgagccgagcatctcgtagtgggacaacaagagcagttcgacgatctctgctctattcaagttagcatccgatcgcccttcttacaggacatggccactatttccctttgatcatcaagcgacctgtgactgcgcccctcccttacgcttccccatactgcccttgctccgctccactcgaccctcccgctaaaacaagcgacctcaatgcggcccatccgatactcagaacacttgcgataggtgatagcgaagccaccaaggctagatggagctctatggcttccgggcacaactcagcatactccgcgtcgactcagcatcgtgctctgggtgatggacgctcctcgctcagccacgatggcggctccgccgatggcagctggcaggatagcatcccacggattgggaggaacaggcggtccgagtctggagggagcaacaacatgggcggacggggaggatcattaacgccttcattagcaccctccattggtggaccaggtagctttagtgcggagctcaagagcacgacttcgcgcagcgtgaccccccgggcggatggccaatacaacagacgtgccagcagatcgatcggcgaggaagattttcacacaaccgaggagcgacaggctttccttcgagacaggatcgcgaaggaaatcaagatcaagagcggaaccgagaatatgctggaggcactactagcaaaaccaccaaaacaaaccaaagagcagcgtctcaaggtcgagtcagaattgacctcgtcgaaccgcaaactggtcgaattgcagcatgagctggaagaagaaatattacgtgcgcaggcgccggcatcgactcctccacgcagcagccgcctttcgagccttttccgtgctagccccatgcgctcaccatctcgaaacaaggatgccgtcggatcggtcaacggcgatggggaagaagatggtgacggtgacgtggagtcgccaacctatgtcctctcagaaacactgcaggctttggagatagaggggatgtctcctgatttctatgtcgagcgcgccaacagcctggttgaactgttcaaacgacatcccacgctgaagtacgacctcgcgtggcctgtttttggcctacgggttcaggtcatgcttttgagtgacagtaaagaggtggtcgctgcgggttatcgactaacacgctatgccattgccgatcgcaaatccctacagaccatccgagcactccataccgatgagcttgtgatactgtccctggttaaagaaaccaaagcaagcattgagagggaacaggcattgaagtttgtgagaggcttcctggatgtcaaagatggtgtccgggagatatcgcgcgccgttgtgcggaccatcgttgctgttgctgaacatcatgaagatcgccttcggaacatttcaattatgaccgtggctgagatgttggtcaaagaccccgaactggttgcttctgccggtggttttgctgccctgcatgatgcgcttgcagaagggacgttcggcgcctcagaatctctgatatcaagttttctacacgttgtggacactccccgtagtcgaaagtttctccaaggatccgaacttgaagccgttcttacgcctttcacggattcattatccgacacactacgcaatgggcgattaaagtctgcagcgcgagcaatttctgcgatgctaaagacttggcctgggctggttattcttgcaagacgtgactcacaaccgttgcgttctctccttgattcgctccattacaatgaccccatagcccgagacctgattatggagctattattcgacgctctgcgaataaaacctccctcctggtcgtcgtctttccttgcgggcagacgactcactacttatggcagagtctcgaatctccgctctgaccttgaaacatcgagagccagccgcgctttcaccgacactaatagcaacagattcgatctgactgctcatttctctactctcatattggccggtttggtcgaggcagggctcccgaaggtatgctcactttgtttttctaggcttggcttaaagcaagagctgacaaaatgaaggttctctccgacgtcatcgaggacgaaacggatctctctctcaggcgtaaagcaactctgctattaacggaggttctgaagctcgctcatcattccttaccccaagccgtcagcgcgaaacttcaagtgcttccacacctaataccatctgcagtcgactttgaaactgagaatcacgacctttcaaccgcaactatcttccaaatcgatagtatcaaccggacattggcgcgttctgttggatatcccagtggacagggtcgatataacatggagaccgatttatccgttcctctgcttcccgttgagcaagggaaagacaagatgagtccttccatggacgagacccagttccgcaatgccatcctagaaactcatgtcttgaacaccgtcaacttcaataagtggaaatgggacatcatccaccgcctagtggagggtcccctcacaaatccaaaaagaatggacgaggcaatcaaaggctccaaattcatgaaacgtctcattgggttttaccggcctttcaagtatcgcttctccatggttccaaacacaaaggcaaatcagcggtatgtccgaaccggctgtgttctcatgcgcactctcgttatgacacccgagggtaccaaatatttggccgagaacaagttccttcgccaggttgcagaatgtctggcccagctggaccgcatgagtgggctaacgtctgcgtccccgctcttctccaaggatcaaatggccaatactctaagtggaggctactttgcgatgctaggatcattgagtggcgacgtcaacgggttgctcatgatggaacgatggcatatgcttaacatgttttaccacatcattgagctgcgagatcggaatgatctcattcagactttgttaggaaacatggattacagccgggaaagtcatctccgggtcatgctttccaaggccctgacaattggctccaaggaaatccggatctttgcaaccagactcctacgcaaatatgccgttggggatgtagcactttcgcctcacgtggcgattggcaatgcggaatgggtggtcaagcttcttgtcacccaattgtacgatcccgaggtcaccgtctgccaggttgctgtgaaaatcctggaagaagcgtgcaaccaacgagattatctcgagttcgtggtcaaatgtcgaccgtccctggatcatctgggtgaaatcggtgcaccactacttctccgattcttgtcgacttccgtgggatatcactatctggatggtcttgattatatcacccaagagatggatgactggttccttggccggaacgatagctatgtcggtcttgttgaggctgctctttcccgagcttacgtcgagcaaccgcgacgtggcagccttgtccccgaggatctggtggacctccaggatattgggttggtaccaccgcatttctaccgagaacttgcacgaacagccgaggggtgtaagctgctagagcagtcgggtcatttcaatgaattcgcttggacgattcgtgatttcaggctggacgaagaagacaacgaaatgcttctcaaagctaaaggatgtctctgggctgtcggtaatatcggctcaatggagcttggtgcaccattcttagatgctgagatcatccaacggatcgtggagatagcaaccagtgcaggagtcctcactatgcggggcactgctttcttcgttttgggcttgatctctcgcagtcgacacggactccaagttctgcagagtttgggctgggattccggtgttgaccaaaagggagattcgctcggactttgtctccctaccgatttccgaaagttgttcttggtgagtatcttacgtccctccgccttcgtctaattatgctcatccatctaggtttcgttccccggctttgattatagatcgaagcgaactcccaaggagaaactcaaggaagccaccacggactccgatcccggcaaccaacggatcttgaagttgatcgtcgatatgggcaacacggtactctccaaacgagccgcttctgatcttcacatgtaaggctcgcagttttccttctgtgactgctcacatttgctcacaattctcacagcctaaaaaccaaacaacccgagcggttccaccaagcccatctcttccgcaagaccctatgcatcctggagagtcaccattacagacttccatctcgacgtttcgccctggacttatttgacaagtgtgtcatgcgacgaattgtcctcgacgaagattccgactcggaatcggactcgtcaactacttcccagtcagaataaactccctgatcttctccttttgaactttcctgtcctgccaatataccctggaagacggctgattgggtgtttggctttttgtactctgagcgacgatttacgcatgttcaatctatgacttctacaaatacctaaatgtctcaaattagtccgagtaacagcattgtatatggatctgttgtcgagtaagactctaatcgtgcccggatgatatccacacgcagttctccaggttatcctgcatggcatgctcaatagcacccggaaagaacgttgtcacagtcgtaatgagtagccaccatgttccctcttcacaacagttcttaaagcagtcgttcatcgcatggtctgacctctagcatttgatgttgtggtagtactgacaccgcatttctcaccacaggaatgggtcggggcttccggggagagataggaagcagtcgagcagaagtaccacttcgtgtcagctactgcgcccagtaaaaagagcgagagaaggctgactgacgcatcaacatattggtggggaaatttgagtctatgcaaacagtcgaagtatagaattgtcaatactctggactgatcgatataaaattctagcgcaatgcctagctgccaaagggaagtcctcatctgactcgtttaggcaaggaaggtagcttgggcctttaatgatctacatggactttacgaacacgaagtgatggacatgattgcaggtcgcttcgcaccggtatggacacacccaccccacagtcagttcacctcaagaggcaaaaatttcagactagtcacgctctacacgccctttgctccccctttcaagccttctgtgtcatgatatttcgttgcaatagatttcgtggaaggatctaacacccttgaaagtttggctagtgttaggagctgcctgcagcactgcttaacctgtctacagatgcagtggacctgtcaaggcggctacattgtctcatgttatgatatgtaggtcccgatggccgtcgctttatgagggcggtcaaagtcatgcgggtcacggggtgattacttatgttgtaataaccacattcacccccgggagctccatgccttcatgaacctatctacttctaagtttcaggtatgacccgccgaataggggctgtcaaatctcgatccgggtgcaaaacctgcaagtaagactttccgctgtcactttcagagtctaactctgaccgcccaccagaatccgcagagtcaaatgtgacgaggaaaagccgagttgccttcgctgctctactacaggacggaaatgtggatatgaggacagaggggcgtctctattggctgcctcgccatttgctttagcgccagggcacgcaccgtcgtctcaaaatgcaggacggcgtgaacgtcgcgcatttgaatactacttccaacatgtgtcccagcatctcgcaggtggaatgaacgtagatttctggacaggggttgttccgcagatctgccgcagtgagcccgctgtgtgggatgcaatgattgcaattagcacattgtacgaaaatccgacgcagttcgtgcactttcattttttgagagatcgccgaaataaagcgtgtctgcttagcaatgcccagcaggatgcattgacatggtattcgcgatcaatatctagcgtttcttcgcagattcagcgaggaaatgcagatccatacatttcgctcatcagctgcgcattatttatctgcgtggagacgattcaaggacatatggaacaggccttggagctctaccgacagggtatcgctttaatacttggtctccgtgcccaaatcggccatggaggagtatctagcagtaaggctgttctgttggaacgcagcattgttcccttatttctacgactgggcacgagttccctgaccatttcggggactgagtttcctattgaaattctcgcatttgtagaaacagatacgagcgttggcttcgcatctgtcgattccgcaagaaccgttatgtccgccctagccgcggaagttatcctctttgagcgcgaggcgaacttacacctcagggcagttggtagtgcgtccgctgtaagcccagaaatggtcgcgaaaaaagaagcactccgagctcgtctcactgagtggcatcgggcatacaccaatctttgtcaaagcagcggccccgtacctactgtccccgtatacccagagcctatcctgctcgcatatcatgctgctgctttggtttatgtgacaggatgcttaaggcaacaggaaactgttttcgatgtccatttcgcagactttgttaccatcgttgagcagtctaggttgattctcgacgcctcagccggttcaaatggggcccagcctccgttcacctttgagatgggcgtgggtgtccctctcgccatgactgtgttgagatgtcgtgacgcaaacttgcgtcgaagggccttggatctattgcggctagcgcctccaatacaagggtttttcaaatgcgcccccgtggctcttttgtcagaagcgttgatgaagctggaggagggctatggccttgctctgaggcaagagaatacagcatcgctttctcatgaagttctcgataacaacgatgtaatgacgcttacgcttgaggcaaccgggtcacaagcagcagcacttatccctgaagaggctcgtatacatgactatagtatcttcaggccgaatgagtggcaacctccgtggatcaccgaggaagatattgcaccgtttccacatggtccgaaccaactatatctgggattctcaagaaaccaatacgacaaggaaagcagcacttggcagccgatctttcaatgcataccgttagaacccagcttatgaatgatctttcacgtctctcatgtctcgtgattatgtgtataatatcagcgactttcaccatcgatgtctctcaataataagaggagaaccattggaataggttcaatttactctttaccaaggataacttttcaattagcttccttagaatagtaagtgaatatgtgaatatgcaaagagccctctcaatgtactgtcggacataaatagttgccctatggccccacctacctcaccgcctgtatatttataccgcctacctaaaacgcgtagtatagagccacgctaaaatagcacgcgaaactgcctttccgtcaaaaactcagggtttatctctttatacagcttcgaggctactttttactttctataccccttctaccacatctctctcgatatggcgcggtccaaagagcttacacctgctatacgtgagcgtatatgtgaactccatgccattgggtgggggtataagcgcattcatacccgctatcccgacattgcgctctctacaatccgatacaccgtaaaaaaggagaaagagcgacgagatggcgtgtcaaagccgcgatctggcaggccgaaaaagcctaccgaagctgataaagaccggatcttggatgctacccacaaagactagcgcattgttcgccgatgccccgccttttcgataacggttatagagtggaacccctcttaacaatgatactccgaaatgtatcgggtttcatttgacacgaagctcctgcattatttatcttcaatatgtccgaacaattgaagcttgacctggatctcattgtgctaaactgtactttggccactgttgaagacgttatgcaatgtgacattggcgtcaaagacgagaaagttcactcaattgtcccgcaaggatcgttcgctggcttgaaggccaaaaaagtcattgacgcaaagggagcactggttacggttagtctctttcccacctctgtccgagtgaactatcgccatgtgctgaccttccccaagccaggaggaatcgatgcccatgttcaccttcaggagccgcctctatttggactcggctccactgcagacagcttcgagtccggttagtctcctagactgcagatctggcaattaacccgttcactaaattgactaaccctcctaggcacccgcgccgcgattgcgggaggtacaaccaccattgtagcctttgcacctcagcggaagcatgaagacagtgttctctcgactctagcttgcgctcacgaacgtgcccacagccaatgctacagcgactactcgttccatctcatcatctccaacccatgcgcaaagacgcttgcggaatttccagccttccgagaaatgggcatctcgtccgtcaagatatacatgacctacgaagctttgcgcctcaacgacgagcaattcttggatgtcttgttccaagcccgtctacacagggtcacgactctggtgcacgccgagaacgactctgtgattgcgtggatgaccaagaaactgcatgaacgccaactatatgcaccaaagtaccatacggattctcacccggccatcgccgagattgaggcaagctaccgtgcaatctgtcttgctgagtttattgatactccgatcttaatcgtacatgtctctaatcctcgagccgtcgataacattcgacgagcccagacaaaagggcttccaatttacgccgagacatgtcctcaatatctgtttctcagcagcgagaacctggatcggcctgggctcgagggtgcaaagtgtgtttgcagtccgccgctgcgcaacaaatccgaccatgaggctatctgggccggtcttgaggacggaacatttaccattctctcgtccgaccatagcccatttaacttcaacgactcgacgtctggcaagggatcgagcgtgaccgcagaacgccccgacgggcagttccacctaatcccgaacggtttctccggtgtcgagactcgaatgccgttggtcctttcggccgatcgacttaagatacaaagatacgtggaactgacatcgaccaacccggcgaaactgtatggcatgtacccgagaaagggggctcttatgccaggggtcagtgatgccgactttgtcatctggtaccccgacgggagtcttgacatagctatcaccaacgacatccttcatcacgacgttgactacaccccgttcgagggacacaaggtaaagcaatggccgcgctatactgttcttcgtggacaagtggtttgggaccgagaagatggaggagtcgtaggtgcgcgaggcttcggtcagtttttgcatcgtacagaaagcatgttggcgggcagtagaagtgatgggtcttgggacgttgagaccgcgtgggtttagtagatggacagattcttctcaccttgcagccaaatgtgactataccagtatgtgcatttactaatggattttgggctcgactgcctgaatatcgcattttttcttcaataacggctccacgtaaatctggatacaacttgaacctctcctaggcgaccccttagactggttgttgcttcctcttcttcaaaggctccaagttagcattagctggtccctcaacacaaactccatccttgctgaaccgactcccatggacaggacagtcccagctcttctcggtattattccaacaaacaacacccttcatgtgaggacaaagcgcactgctctcgtgtacctctccatcttcgtctttgtagaccgcgatcggctgcgaaaagcctttattcaagaccccgcctgtgccgggcaccagatcttcaatatccgtgatatcagtttgtagaaagcgcttgtactgcgtatttatctcaagatcatggctgagcatcgatggaagcgactttgccaagctggccatgcgacgggggtcgtaaagttgactccacggattcttaaaccctccgatttcgtcggcgataagctttccagccagaacaccgtgcgtgagtccattgccgctatcaccagtgacaatgtacgagtgtttcgtgccttggttttttccgatgtacgccatgtaatccacaggctcgaatatctggccgctccatttgtagtccacagaccctgctctagtgaatcgggcacgtacccactgctccaactccgcgaatcgaccgccggtatcttcttggccgaccttgtggtcgcagccgccaacgacgaggtaatcgtccttatcgtcacactcggtaagacggacatacttgtactgctcggcctgatcgtaaagtagacagtcctggacatatcctttagggacgcggattgcgatgcagtaggtgcggttgtattccatctgggcaatgacagcgagcttctgcaaaggaacacatgttgcctggacggcttgattcgcggtgactttttgaccattctctgtttggatagtgactcgttccttcccgaaacccaagacctcgaatccttcttcggtgagtgacacggctcgggtatcggtgaaacagttgaagttgggctgctttctcagccactcgagaactccgacgaggtactttgttgggtggaaagttgcttgattttcaaaaacagcaccgcctcgctggtccgggccgctgtcccaaccctggacttgcaagtcatcgtggaagctcactgatagaccaagatcctttgccattttgacctcctccctcaatgaatcgatctccttttgataacccggatggttcacattgtattgggaaatttcgtaccctgggaggtagcggaattcacattcgatgttgaggttcctagctatttctcccactcggttcaaggcccaggtatggctttccgcggcgatccgcgcattttccttgccgtgcttcttggctatttcggtgtagccgtcatctagagcgttggccaaatggccgctggtacgtccagactctccagaaagtacttttcttgcttcgagcagtgtgacattgaacccgcggttgacgagttcgtaagcaatggagactccagcgattccgccgccgacgatgcagacatcggtttcaatgttttctttgaggggcgaaaactcagggtgtttggagtatgggacttggtgaacccacaccggatctgcctcaccggaggtgttgagaaattgggtgactggcgacatagcagcagccgctgacctaatattgaacgggcgattgggtgccgggaactgcttcaaatggtcgagcgtcgggtgggctttcggtcgcgcagcactcagatttgcgattgaatggagagccgagagaggagcaacatatgtgaccttcctcttcaaactaggccccagtaagcgtgtttgagagcttaaaatgcacagcatgagctctgtaacgatgaatatcctttgcaaaatttgagcttcatctgccaccactcatatctttattgctcattcatgcttgtgtctttctagtagacatgtttgatgacgtagaaaacggtcattggcattggcattgcaaactatgctaattgggaccctgggcaatctctgatatgattcgccatcactagcatagtattaacaatttattacagaattggttcgtaggttgtatggagatcaagcaagtttatatacgaaatggcaattgggggttctgggtgacgtcatggtgcgtcgaagaatctcaccaggcctccaacggagtgaaactagcggacacgaatacaaccaagccagtgagttaatggctgggaggaccgcagcgaaagatacccggccgatgcccaaagactttggcctgggccttcggcttaccactaattctcgttgctgaaagcatcgtgccctagattgtcaaaatatccgagtttactgcgagtttctttgccaccgatataggaattaagaacgtgttagaaaaattgcagcatagctcaataaatcataccatggtcctttacgggtcagaaagaagaagcccatggaatacggactaagaaatatagaggacgaagtagtgacgaagtagtacgacagaataatggagacagatgaggctacatacctacataggtacctaggtagactttacgttacgtaacgtaacgtacattccaataagacaaaaaaattagtcgtgcccgggatcgaaccgggaaccttctcggattgaataatcaagcaagctcacaacactgtgaacgagaaatcataaccattagaccacacgactacgcatatatatatatttccatcttgaaatagattaaggagatcttgatccaccatatctcttccttacggtagtagtaaagaatcttcaatttatgatatgcagtccgttgcaaaactatcaccctttgagctttgagatttatgataaatcttttagcggaaataaaagattaataatcagtcgtgtggtctaatggttatgatttctcgttcacagtgttgtgagcttgcttgattattcaatccgagaaggttcccggttcgatcccgggcacgactaatttttttagcacgtacttactactaactagttagtacgtcgtctgtttattaactaaccaaaattttatacgaaagactaaaatatagataggaaatagtgttacgatctaaaatcaggttatagttatactttttcttatttatttgctcttattcttcttaggaggtgagctatagttagtgtgtgtttgatagatacaaaattttcgtttatagaacagataactaaagttataactagcagctagttaaagtacgtgctaaaaagattagtcgtgcccgggatcgaaccgggaaccttctcggattgaataatcaagcaagctcacaacactgtgaacgagaaatcataaccattagaccacacgactgattattaatgctctttctaacattaggtatctaagtacctaggtaagtaggtatgccgttgaaatagcaattccaggcttttagtactctataaaagagaatgtcttccctgattaacaattgtcttcctagcgttctcgggatgggtctgtttcacgatccgagatttgtcacattctgggatttctggaattagtaccttttatacggcgcactcatacaaaaggtatatagacataatattttaacaatatagattttcttcaccctccacatagtgaggaaaaatataagcatatatatatcttatataaaatccattttatatatctaactagatagaaatattaagtgtagagaaaaagtcgttagctaatacaacatagtgtgctaaaggagacttatttttttggattgatccttatttctcttaagtaactagatattaatctataatcttactgctaaaccaattaaactaggcctatattatatatctaagctcctatcttcctttacctatctcgtgagtaataaaaatctagattgttgaaatatcatgcctatataccttttgtatgagtgcgccgtataagaggtacctaaattccagaaatcccagaatgtgacaaatctcggatcgtgaaacagacccatcccgagaacgctaggaagacaaaattgttagttcatctgtaatcgtgagtttgacacaatggccttcgtcgctaaccgtatgtcaagcacaaatgccccatgtacctctgagatctcttagattatatactggagcggtgtttgctgtcgtcctatcgagtgaaatcattgaacaagaagaaatgatttctgccgaatatccagctttgtaaaagctgggaaataagagtgttcggcaagcactctaacaaagttggtggaattaaatacacgttcccttcgaaaatagtatacaagagtgaagctgagagatatacagctcggtttcctaagggaatctatgtgctgtgacaccggacctcgggatccatggatggtcactgatctgattatctaaagttgacccgcacctgtccgcagcggatactccagcttcattattttccctttccctcttacttaccgcattttatacggactatagtgtaatggaagatgcagccgagtccctgtcctcgacacacccgaccgacgctgattgcatcccgaccataatggagagtcccaaggtctcaaactcagatgtctcgagctcggaggagcatacacctagcgatacagcagagctgcctcatctggtcatccagttaattcaatgccaacaatgctcccgccccttgcgaagtccgctccgcctaccatgcgggaattcaatctgtcgggaatgcttacctgcccttcggctgcgcacgggtattacttaccccgtggcagaggggagggaccaggaatttacatgcttttggaaaggaagtaaggcgtgtgttggggaccattgtgttggagactgcggcgctgatgtgctgcttgggaaattggttggtcttttcggggaaatactggggtcagaggcaaacaaggcaaacaacgtacctcaagatttgtctcgggatgacgggccattactgcgatggaaaaccgacgggcggaatcaaaatagaagtgcacagttgcagcgacatgggtggctggggggactctataatctggcactggaaggccggttcccctctgatgcatgtgaagttatctatggagattctactaccccagccggaagcattgaatcgcaggatctcattcactttcaaacactgcgagacagtctccgcgccgagttagactgccaggtttgctattctctcgtcttggatccgatgaccacgccttgtggccacaccttctgccgaaaatgtgtcgcgcgggttctagaccataccgatctgtgccccatttgtcgccgaaagctaggaatgccaaatgatctacaatcacaacccgtaaatcagactgtgacgcggctggttgactaccttttccccgaccaaatctcactcaggcgggagaccagcgcccaggatgaaacaggccctggttacgagaagaacttgccacttttcgtgtgcaccctgtcattcccgacaatgccgactttcctccatgtcttcgagcccaggtaccgacttatgattcgccgtgttctcgcaagtggaaatggaaagtttggtatggtcatgcacaaccggcaacgccgggcactgccaggtcagcgggaagacgtaccattcgtacaatacggaaccctattgatgatcgagcgatatgagttgcttcctgatggccgcagccttgtggtggctacaggcgtgtcgcggttcaggatactcgactcgggaatgcgggatggctattttgttgccagaacagagcgcgtagatgatgtctcgctcgcagaggaggagcggctcgagtcgatggaaacctcaacggacggtgtaaatgccctgccagaagagaatgaatctgatcccccattagactcaatgtcaacgcaacagttactcctcttggcaagagagttcatcagcaatcagcgcatatctggggctccttggctacacccacgcgttatgttagcttatggacccatccccacagatgcagcgctcttcccatggtggtttgcaagcattttgcccatctccgaagaagaaaaatatcctatactcgctgccacaagtgttcgagagagactgaagatctcggcaaaatgggcgagacaactcgaagctcgagactggtaagttcaacctattttctgtgagtttgatactattctgacatttcgattaggtctactcgctcatcacttcactctgtcttatgactatccgtccctctccttgtcttctgcgtcatccctctattactgaggcccttgtcaggggcattcacctcgatatcgccgaatgtattcacttcgttgacgccgttttctttctcgatatcggtctcatttggtggccccggtctttcgttgcccagtattagctcgcatatgcccaacgaacctgatcaaacccgcgaaattggccaacgagagccgaaagatgacacgtacgtctctcaaggatttgtgattggcgccttcctggtgattttctttgcccaggttggggttaattttctgcatgctcttcgaaccggaagacgcagacgacggtttctggaaacgcagtttccccagcccttgccccagcggggtcaggaacaagatcgtggcttggatcgaaggcctggtaccaatacgaatgctacggaagaaagtgcacgagatgagacggagggacgccccgctacatgaaatggtgtcggatagtgggatccgacacatctgcccaggtgatacccagatttaaccccgatttggtactgtatgtcatcgctaccacacaagaaatatacccccttttgacgaagcttcacgacatttccttttctttttctcattcattataatctgccactttatcccaacttgttgtatatagaagcctaaattgggactccgcatattgaaatccatgtattcttgcaactcgagattcggaccgttcaagaagccttttgagatgggctcatgttatacaacatgcatttacctctctatctaatacctgcggagtgatctaggaacgtagtcttagatgttacagcctatctccagtgattcttaccctttccatccttcaacattatgcaccaagcgccacggattatcaacaatgagcacatgtgcaggaatcgggtgccatagatgtactccgtactcttggcatgcgtattgtacatgtatttctcccctgactgtacatgtaattttcagacgtaagatcgcgggacagccctaatggtattccatggttgattggtatcggtgccgtggaaatataaaacctacttttagccccatgcggcttacggcccccatctgaaaatttccgaggttcttctgcccttggaacctgctgtattcttcttctggttattattttgcggacatgagaatcagccgcccttggttgcagatacagcgtctgctcaaagaaccagccgcaaaggttcttttagtggcaggttttgtgtacctgctcacatttcaactctgtcgaattcacttctggcgcgatcctcactccgctttcttcgatatccgcaatgttttcgaatggaagtatagtctggtacgagaacatgaagcgaatcatttcatttccttttacagtgcgccgtcggggggtgatcctcgtactgttttgagcgaaggtacacctttgatatgcgcgacgctagctactgtgaagcgcagcaaagacgactattttgcagcggccgtgggatcaatgctaagcaatctcgatcgtcgggagcgccgtgcgctttatctgtcggtattgttcgcaaatactgatccaacccaacatcctagctggggccagaaatggctggaacgggtagtggattcggtatcgacttataatgtctccgcagaagagtttcgctatctccaaaaactagaggaggagcgtaacttttatgagaaaggtgtctagtacgtttcgagtctgagccgctataataacattttatctaaccgcaaggctactagtgactatatctacctccttaaccaatgcctcgaaacgggtgccccgtatatgttagtccttgaggatgatgttattttcgcagatggatggctggttaaaaccctaaacggcctttatacactgtcacatggcccgacggctcgcagcggatcttggatatatctccgcctcttctttaccgaaacatctcttgcctggtccacctcagacttttggtatcgaaatatgctattagcttttggtttggttattggatctggatatgctcttttgtcagccgttcggcgatactggccttccactcgtggtttcttaaacaattggactgtcgccgctatatgtctggtggtagctcctgcttttacgggattggtatacatgattgggaaatattcacttttcccactacaaggtgtggtggagatgaatggccatggatgttgtacccaagggttagtattccctcgcgagcaagttccagctttggtggcccgcctacaagaaaagaaaagcggccaaaccgacagtttgattgaggagtatgccatcgacagtggcttgacaaggttggcacttgcgccccagcagctacaacatgtcgggctgcaatcaagccgcgacaacctggaaatcaatacccagagcacctgggccttctggtttgaggagaatgatgcctcggagctgaatattgagcacaaacggctcgtggctgcgagtgatgatgattggcatttgggttgaaatgtattgtttgtatatcgcttcgggaactcctatttcagataagagccattcttctgcgattgataattctatgtcacttgaataaggagaaagccagtacgaaatcccggaatgtcaccaggacagatcgttaatgtgccatgagagccagctatctttttgtattcttcaccggatgtaagaacatcggaggcaagcaaaggcgatgtccgtcctgtccgtgtttattagcaaatatcaccaggaaagtcaaggggtcaacaaaaccactcaccttctctgaatcatcataacctagccaggctcgatagatcttttcggggaattccgacccaaacatgtatgacattttcatcagaatatcattgtgctggttccagctccagatactattccacccagcgctgattttaccaggcttgcccgagttagcccggagattaagctcaacgggatttgtatcgtgcgcatggtaaatgggctgaggaacctgaactgctttcaaaccataataaagagcccaggatgtgggggacatttcagatgctaaccccagacctttctcagttttgtccgcatgcatgaggcggagcaaccgggctgagacacgggacattgccacaacggatgcgcggcgcggagtccgttgcttttggcggaaattatacacccgggtcctgaagggccaatcggtgtgccgagggttaaattgaggtagccaggttatcacgtcggcttcctcgcccacgccccaggtccaagaatcatcgtccaggtctgagcgtagagcctcgggcgcctcattcccaacctcgataccttttgctggttgtgggccccagatactgtcaaggttcgtcatgctctggtctacctgatcgataaaattgtcccagctcccgtgcacagcgggggtgtagaagtaagagttgcgctcccatagattcttgcgaggctgttgctttgcaaactctgctgcctgctggagaaagttatagaaatgtcctgtataacgtgaatccatctcaaactgccagaaaaagtcgtattgtggattcacccgtgagaaaatctgcattggctgaaagtattgaagtatggctctggaaaacattagcgtttcgaaatttgactgaagctgacgaaatcttactcatgaatatcgatctttggataccagtcctctagtatctctgcgttgaaaaacactgctagatcctggagctcccgcggaagagagattttcagactgtccaagcccgccttgtccgctggatgaggcacttcaacgtctttcgtatcaaccaagatgatcacctcgtattctgcgccggataagagcgatagctccattataatcgaccggatataatagagatcatcttccgtgtattccatgccgagccatgtgcgcaggactaccgccgtccgtggtttgaaaacagcagaggtcttgtttcgatctgtctcggttctccctccggcccagcgatgttcatctgtttctttatcgtgctccctgtgcagagtctgcgtcttttggccaattttcgaaggctgatatcggtctgcattgcgctgcaagcagtcttgttgcaaagtggcccaatccacatcctgccactgcactttttcgccttcatctgcgtagccgtacgccgcataccgagaatatcggtcggcgcagacactccggtcaaggttccacgcctcgtatgatccaaaaattggtgttggaaaacctagcatgctatcagtgttcgctgaactacaatatgccataggcttgtcaatttcatacctgactgattccaacgaaacgctttcatagctgtttccgcattcctacgatccaggactgaaccatttgggccaacgcactgctggtaagttcctctccatgtattgttccatgcgaggctgttatattcaggatatggatcgtaaggcacggagagtggctcgtgcggagtttccaaaataagctgaccgaggctatccccatcaccagcagcgccagaacctaggaaaaaggcattttttttactgcaaggagacaaccatgtcagcgactagacgaaaattgccgtatcaagccgtattagcctaggtggttaaacaacatggttaagcaatataccttgaaggatggactgttcgactgccttgtattgtattagcttctcttgacagaggtacaagcatgaaaattgtaaatgcaaggccaagtgcgaccgcaaagagaatgcgctttagggaagtgcgcaataaatgtcggcatttcagcacaaggttgtcaatgaggcgcattttcgagggatgaccatgtgggtttcaaggaatgattcaaacggcttttgtcttcatggtcgctgatagtgatacgttactcatgtccacgggtctgtggacatgtatgtagtggtaaaaggaaaaggagaatgcgcaaacacatggctggacagtgggcagatcctattggctgctgagattgggagcctccaaagttccttggaaccttggaaggttccgcgggtagaaaagttagtcatccgccacgttacgcacggacccggaggccgtggcccgtagatggatactgtatgtccgcagatacatattccatacggagtacatacggctgtaatttacacagcgaaaaaaaaaaatgccagccctgtgcccaacctttaacggcgccttacccgatatagtacaggtgtacatccttatgatagagtaacaagatgcagatttttctaagctatgtatctcgataaactctggaatttctttaccgtaggacatcttttaaaagcgaagtaagaaagaagaagattaactgggggttggcagggtgttgggaaagcacggaccttgactcaagcgaaggaacagatggagtactccgtacggactacttcggagaatactccttagttaggtgctagtgactctaaattacggagtagtagtaatcgcgtttaacaaacctggctcaggtggaacactctctctatcttagtacgaagtatggggtatatatgcactctgtttggacacttgggaggggttttggtacagattatcggtgtgactacctaggtgcatgtctctgatcatatatccaatttaacccctttccctacctgttttccgatgagacctagtacctaaacggactagcttattgatgtctagttgagacatcaatttaattacaccggttcagggaaggttctaccccatagaaattcattattgatcatagattgatcaatctaattcagtttttaccgccagcgttcattcaccgtgtttacctatttagtgcggcctcaataacactgcttatgccatctgtacgatcgaaagataaccggccctagcagtgatcccgcaagataaaaagaatgaccagttcaattcaattcctagcaactgtcttctcgtatcaggtcttcggccgagctctgtatcagactccatcgacattcagataccaggcggttttttactactacctgccttatgaaagatgttatttcttggcaaaatagaagacaaccacacaagattttttgcttgaaatgtaagagatgccactccttataggaaattcaaccctacttcgtactttatcctgagacagaaactggcattgtttaggaaggagccactaaaaacggtaatacccacaattaagaacccaaccgttctttcacagcatcatgttccgcgcgcaaagcatctgcatcgttcatctcgaactcgaaattccaaagcttctctacaactgtcaaatccgccttagacttgatcttgacgtgtgacgaaatatcattgctggcacctttagagctcttccgcccaacatgctgtacaaggcttggcgtcactgcccagcgaatctcattcctcgcatttgcatattcctcagtgagcatgtcgacgtatccgatacgcttggatgtatatagcgcgacaagttccggtatccgtgacttggggaagacaaaggcctgtgagcaacatccaaatttggacatttgatgcacgccgttcgctcgagggagcatcgtcactcggcccatggcagaaaagagcccaatcaataatggtgtgaatataatactcaaaagaatcatcgtcgtatccggtaaaagggagcggacatgcgcgttcaatttccgagagaccaggagaacgcaaaccacgaggcagacgacgagaatggaaaatagaaggtaggtaagccattcttctgcgttccaaccaaagtattcttcggtataaaaaagacgtaggtatagccctaggtaagaatagctattagtacgagcaaaaaaaggtaactcgagggtatggaatttcaagtcaaggactcctctagtctgcaatggctgtaaaactcacaatttgcggctcccatttctcgagtctgttcttcggcagaggataaagcagcttgagtgcgatgataccatccgtctaaagccacgaggtcgtcttcaagcataatgacatatggcgtgtcaatgtctgcacacgccttcaagagatatgcatagtcaaaaagagccttctcacgccctgctatcttggcctcatctgtttctagggagtgtatatgatcaacgtcaacttcggaggcattgtatagcaacacctggtccgctagtttgtataaccacggctctgcatacgcaggatgctgcgatggatccgtatgtgcgatgaaaagaatcaagtgaatgcccgctctttcttcctcgctcaggccctcaaggaatgtgcctacagtagcctggaaatatctggcaccctttcgtgcaatggtagcaattcccaagcagaatttaggctgtcgtggaccttttggtacttgcggctctgtatcattgtttgccgcatcgataaaagaagctgcctgctcaagtctgatagccgagtagacaggatcataagcttttgttggatcgaaaaatattgaggtcgggtcatgggaggattgtctgcgtgcaaccataataagtaaaacatagaagagcagaaagaaaagaaaattgcgaagcacctggaccgaggtaactgctgaaagcccagaaatggggagccggttcaaaagcattgcgcaaggcgagaataagagtgagaagatcaggctcggcaggtgatccatgggtatttcgtatctataaacaagttaataagcatgtggaaatatttcctattcccagaaaagcccccggggccaaatgatacatgtagactccactaggtggccccagtgtacacgtacacggtcccccaatacactctgcttctccactagacggctcgagccgcaggggtccaatacaagaattagttcagtacaataagtgtcttttgtatgggatcgcgctacaaaatgtacctattatcaaaaaatcccttctcgcttatacttctcgaccacaacattgtatccccagtataaacgtaggtgcagaaatagtgtataaagaacggtgtggttcaaaagagggtcctcaagagtgcgggttttcgaccctctacattgatataacaagtttgaaagtatttcctagggaaatagctcgacatatcccagattataagtcttagtatcaacttatctcccggatatccaatctcgtggtttgtgggttaaaaggattgtactaaactagatattccaagtcgcccttggagtacacacaccgttgactagttaaccagtaactatctttttagaagaaattatccgactactatcattgtcattctgagtttaattccctttggaccgaggcaaaaattacaagctacatttacttctgaatatgtacaccatatgtactttgtactctgcacaccattactaccctggcccactattgctttaggaaagcagaacaaaaagtccttcggactgagcctcggcgaatcggaagcactacggagagaaataagcgaaagggggaccaagccacgggataaatacaagcaattccaaaccgaacccctgcctaggagcggggggaggttggacatgtgtgtacatgtatgaacgcagtacgcactagtctgtacggaatacacagggctgggtatagtttcccggatgatcctttccccgaatgcgaggcttacgtcatagcatcagaacccccggggccttctggctattcactattgtgcccatgctggctgtcacgaaagtgcatggtaggtgctcagaggctaaagaagggctgcaatggagtcgtaagtagggatttgcgcgtctcggagctcttccagagcattactcacgtgctgctgggaggacctggggaaagcctagagtagtcgttcaatgtatttatacaacgatacacctgtgctattctgacatttgttgcccggagaggaaccgtggacgaagagaagagccgaaaaggaaatattgggggattagggggcgtttttatacacccaacagacgcaccttcccagaataaaatgttctatgctttcttattttgtccgttttctcgtgacttaaaacaaatcatcttgtggaccgcaccttcctcgcctctcaccccatacttccattcacattctttatagccggtctatgggttatcgaagaacgcgacattctcgatcgtcagcaggtctgcggcctacctagggctccccaccacgcattatcttggcaagtttctcgaaggcagtgcgacggttgttcatgatcccgttaaatgtgtctgctagcccaatattaccaattacaggctaagctctgccctcggctagtgcctgataaacctgctacgtgaatatatccaagggcatcccaaacctgcgacccgcttcctcccccatgtagtcgtgcaattctgctatagccaagggtctgcactgatacatcagcgtccttgggctaggattgccttactcccgacgggtagaggggaaatctcgatcatttcggtggtcgagtacttcgagtgccgcagctgctcccgcagacagagaatgaagacgttcaccgtgagtagctctggcctccgatgcctcgcagatatagtacggagtatatttggatggaccttgtgaccagggtgggttcacccgggacgggtctatatacagcttatgtaatctcgtgtgtttgtccgcgtcttcttcttcgaccgaacctcgaacaaccaacagcgcgccatgagctcaatgggatagataaactgatacatgcagatcaactctatacttaaacctacttgccatccgtcaagaggccaaacagctccaacgcagccatgacgtcgctctcattgtcgctaggcccgccagccttagtccggctccatgacgctttaatatgcctctccaaattcagcgaaacagtcgccatcgaagcagagcctgaccttgtaagctatcctaccttggggaagatcagttcggtgcaaattctccaagccagcaaatgagacattctgactaactgtaccccagctccgcctcagtgccctcaattccaccaagacggggtttgcctccttcgtgttcgagaagggggtattctttgaggcatattctttcaactctagcattaatggcacgagtggcagtgtttcgctggaacgattcttctgccagatctataacaaagtgagtatatagaattttccccacttgaatttgggtcctataggaaatttacgggtgatggtcttccttgatctatgctgatatcgaatccaggcacttctctccatattccgcgggagaatcgacagaaacaaggacacagccgtggaacgctgtgacatggaattgcatgaagatctgcagcaggctgagtgtagactaacagtgaagatgatttgtggactaggtaagatacccttgcatggaaccgtctttgctggcttagactgcatatatctgacactatatctaggcgtgatcaagtcgtacaagttgacctacgaaccagcggctgttcagcatgccgtcttcgacaaatccaaagctaccagcatgtggactgctgatccacggttccttaaacagctcattgagcactttagcttatctgccgagcagctggacatgtactctgattccggcagagcggtgttcacaagcttcacaacaaaaatcaccgatggcaagggtatgtcaagtcctccatcgagtctccaggtctggtttactgacacccaaacagaagtgctaaaacacccagtccacacatccgtggcagcagacaagcgcgacttccaagagtacttagtcgaagataacatgcacgtcgcgatcaacctgaaagatttcaaagccgtagttgcgcacgccgaaacggcaaatgctaccgtaacagcacggtacacccgaccctgcaagcctctgcaactggaataccgattcgaaggcgtcaacgcagagttcacaatcatgacccgcggccaggcagatagtgacgacgtccccacgtcaacacgcgggacaatcccacggcaaacgcccgcgcctgtcccaatctcagcgatcaggcagcgcgatactcgcccatcggtgactccaagtactcagatgcccccgccgccaccgagaagcagatcgatccgtcctcttaatgggtcatctacgcaggagaatctgagccagaaacctagcgcagatcgaccggtggcgtctggcctttcgatggaattcgatagccttttcgtgcctgctgatgatgaccggcagtgggatgagatggatgaagaagaggagccgcaggatattcttggctgggatgcgtcgggaacacaggtatgtggttttcctttttcgcttctggtggttatggatgggtggctaaccaaacgcacaggacgcattcggggcatctattcgcgatgcggagccttccttctcgaaacatgatggttcccgtgccgaagacgcagacgatgagatgggtcttccgccgacacagcgtttgtctcaagtatgtatattccggttcttgcgagactcccatacatgtgtgctgatggtaattgataggttcgccaatacggtcttttcgactgagcaaacaccccctgtcaggagcaatgcagttgccagcaactttcggcgctctaagatcccaaattcaaccctgtcacaatcatccagctagtcgcacaccccgctccaaccccgacaaccttttcatccgcgcctacggcttcagggagcgaaatcacattatatgtacccgacacattcccctgagaatccgtatcaggcccacagttcccatgctcgccccatccaaacgccgccactcggccatcttgcagaagagcaagggcatgttcactgccaacagcgagtttagcaggagtcggaagatccggcggtggaagttggcctcggtcattgcgcccccaggcaacgatggaaccaccggcaaaatccgaatcagagtctgcctgtgcatccgatcgaggcccggtgcgtaacgtttcattcgataccgagggttccatccgtcccagcccagacgcagcatgtacatagaccccatgccaactagccgcaatagcagtatagctattaggaatagtacctccgcaccctccacaatcctcttgccaatcatcttgtaaaggatctccatatccacctagatctccatcatcccccacacgcaaagataagctctccgggatattcaatataccccaccgattccccctatccccaaggacaacgaaccgcccccgccccgaaacaaccgtaaactccctgccgcaagcaacagcctccgcaaagaaaggcacacgaatccgaacaggagaataagcaatcttagcatctcgattatccctcccgagctgacctttccgcgccgcgccccagccatagacatgtccgttcgaaagcacagcagccgaatgagccattccgctcgccagtgctgtgactctcaaatccgttggcgggaaggaggggatacatgtccccgggacgggggcagtggtattccgacctagacccagttcacctttaggcgaggatccgaagacaaagacacgatcttccgtgtcgggagtgtctccatgatcgacatcattgctgcttcgcggcacagaagctacagcaatcgtgccctcccacgtggcggagacgtgtttgaactttgatacctctgtatcggatgctgcatctgagatgaccattcgacgaaagcgcaggatgtttctgttgtcattggactcgtgctcttttgggggtttggttcccctgtgcggcccgcaccgtccgtctgcattgcagccggcagcgtagatggagccgctggttgttagaaggagggtgtggtttccacctgctgcgattctggtgactccagactcatctgccaggctggtgctttgaatggtggtcatttggggtccttgtgatgtctctgtctgtgcgaagagacattgtgttggtgtggggacgtcttcctcgtggccaatgcctagttggcctgatccgtttgaaccgaaggcgaagagtctcataattcttttcttttgtttttcttgggattttatgtttggggaatcatcgaatttgacgaagtgtgcgattcatatacatcaattccatcgatgcccgcgtgcccagccctggagaaaataaagtgttagtcagcatttctgcctcaggctagccgcaaaatctaagtctcttctacgagctgtaaattggatgaatggtcttcaagaataacatttgtaacaatatgtggtatcaatatatcaatatccatggatcgaggggcccgcttcatgcgtcaagcaaaaagccgagtcatatagcgagcatgaagatttccaagaagcgactcggtgtatatgcaaaattggctttttaaaagcgaaaaatagaaaaagggaaattattcatagccatgctagttttaaaaaggaaaatgtttcatggtctcatcacaggcaataacctgaggaccgagcaaaccaaccacttactgcttctcattgctgtaagcatcctcagactcactctctgcagggggaggcaaggtgaaagtatcctgcttggaagacacattcttctccatacccttgaacatagggctagtgcggtggaagtatgtgtgcacgtggccctcgagaagcgagtcgtcggtgtcaacggcatcggaagaatccttttcagcggccttggcagccatagcggtctcccactcgacgcggtactcctcgaccttctgttggtagtcgagttcggcatcgtagtaacgggatttgcgcaggacgtagcgctcataccatgacaggtgcttggggtgcacggcaggaccgtggtagtcttgctcgcgaccctggcggaggtattgccatcggcgctcttgctccttcaggtcaaggccagtggtgtcgggaaggaagaaggcggtgatcacagcaccagccaggccaaaccaaggcacaacatagaacttggtctgggtatcgatgtagttgtacaggacggcggccagaagcgcaccagccttaccccaggcagcggacataccgtgagcggaggcacgaatgggtgtggggaaaacctcggcagcaaccaggaaggagaccgaattgggaccgaactggttgaagaaggagctcaggaagtacatagtctggaaggacttgatgttctcagggcggcggtagtattcgaagttgaaagcagggacgatgaagagaatgaagcagagcatgaaaccaatgatctgcatccatttgcgaccatacagcttgttgtcgatcaagaaagaggccatatagtatccgcacagagaaacaccgacattgaccaggttccacaaccaggtgggcatgacagattcggactcggggctgatcaccttgatgaactcgctttggaagagcttgttgccgtagaagaagacatcgttggcgaaccaaccgccagcagttgcgaacatgcggaatccgaagtacttgaaggtcagcttcagagactgggcatcgtaaccagtgacggaagccttcttcttggcaacggcaagttgcttgctagcagccttcatgtggtaggcacggtagtacacaagccacaaagtaccgacggcgggaatcgcgaaggaaactcggtaggtccactgaacagagacggtggagtaagggttgttaccactgccgtggtggaagcagagaaggagaatgataagcagaacctggttgaagaactgaccccaaccctgcatcaggaaggcactggtgaccttgcggccacggtgcaggcgatcttctttggtggagatcttgccagagccgacggcattttccataccactggtggcggtcatggggtactcaccaccaacaccgataccgtagatgaagagacaccaagcataacagataatccagccattttgggtcacaccccaggcggcagtcaacatgacaagaccgagaagcatgataacggcgtcctgaatcaaaccccatcgacggccaagcctattcactcgttagtctagtcctagctcgattcccacgggtgggatgattgcagcttaccagtcacccaatattccaaccagtatctgacccacgatgataccgatgatctcgaggtagtcgatggcgtagatccactgctgactgcaggttgtggcgtgtttccagcaatcggggaaggctgattggaagagaggcttgatgttgccgatagagaagagcacgtaaccctccagaccgagaccagcaccagggaggaccatgttgcggaagtagtaagagatgggcgagagggggtcctccttcatcatcttccagatatcactcagctctctctttgcctccaagttgttgtaggaggtaacgaatgtgatcttcttccacagcgggagatcagcccagtaggtaccctcgggcgtgtagctgtcatcggggcgaatgagggaatcgaaggcacccttctcgttcatatccatatcctctagcgggttatggtctcccgacatgtcgggcccatggggggcacgaggaccgaagtcggtcatggtgggagtgttcactgaaaggtgtcgcgtgagcaggaactttgcctgataaccgggtcaattccggcggagaggagagtcaaagtgaccacaatagttggggaaggtgagacttcaacccaaggaagtggcaattgactttcttaagtatgagaaaaggtagaaggtgggaagaagaagaaggcagaagcgagcagtgagggaaccggagcgcggaagaacatgcaacggcacaaataagcgtctccacttcaaactcagaaaaaaacgaccaaaaaaaaaaaaagcttggaaggtcggaaggcaaagaaccactctatcttggggtcagggccctcttacggtgtggatctgggtctgctattgctagttttggttccggaagcagattttctacttttagtggataaaagtggacccaatggatcttctatggggctaccgggagccaatcaaccatgcacgtgggtgcagaattccaattcaggtggacaccgccttcggttcgaggcagatcttcccagctttcgcggggcgatgaattctgttcacagtttcagttcgatgtttgacaataattactcctatacgtagcacggagtatgtacggagtatttacaatataacattatttgtcgattaaattatgaagcatctgtaatgtacaagatttatatataggcagaaatatgtcaattcgaaaaccgcatgccaaggcaatgccaatgctatgccaatgggatgccaatgggacgccacgggcaaagtggcaaccccgtaaccaacaaacctagtcccggagcccggaggtcatctcggattcaaggggaatatcgtaatatcattttacgctttgactgaggcaattgttcaatatctacggagtaaagcaatctcgctcccaaaatcacttccaataccgaaacggcccgcatctgggccattcaatattgacgtagtggctgagccagttccacgctaatcgataaccccggcatcctgtatgcataatctttgaccaatcagcatgcagcatctgaccatgtgcagctccatcctccgcaccttcgctcgaaatctaaacctaccctcaacacgtgttgtcacctttcgtgtcaactgctgtcctacatcccgatctatccggtgaatctacgagatgacatggactagagtatcattgacacgagttgcccggcgaaatctgtttcgaatgaaactaaaattgtgtattatcgaccatcttgggccagaaacgcatctgaaatcgaagcatgcgagcatctctacgtccaaaccttccagaatcttggctaaagcttgcttcggcatctcacatcatcccaagcaattccaagaaattccaagcaattccaagcccgtcaagcaataataggcttcccgacgggcgtcgccaagtgagcttctacaatgcttggtcttctagggctggatttggtgatggcaagcacgtgctcacgtttcgcgtggtcagttgtcaaaatcaagactccaacattggaatgcacgcgtggtttgatatgtctcgggccacccccctactttaggatactcgggaatgcgtctgagaaacctttgtacccaccaaatatgcgccttgcgtatgatatgcgccctacagaccgattttgcttaatttcccccttttccgtttcagctcccaggggctgcgctatatgctatactttacgtgggtacctggatgatctcgggctatactaacccaacatctctctggtgctggccaatgaaggcagatatctttctttgcttatttcgccttgctcattggctgttccgtcgggaatcccgcccttgcaggctacatacattagctgacttctagaagagcggaccctttggaagattgccctggtattatagctgccgtactacgtacgtgtttcccgacatgagcttgtctacaaattctgtgggtttatagggcgtgatctcatgatgggtacggatatggagtacgcagcacatcacagataccagtcgactaaaaataaccaaggtacgtatacaattgttcggtatccccgaacctcgtacatccagtcaaacgcgcccgtgtacattggaaataatcaataatcagtattgtggcgtgtccagacactagacatgacaccctacagccctatatccggatctattggaaggattatactctgtacctagatagcttttagcctttattccatcaccatatagcgcacacttatcttcaagtgctgttgctggtaagttcgtttttcttttgcattggtgtctcttccttgcacattcattcacgtggttgtgttactgtcccctatagggcactgtaaaagcgatatacgcagatagttttatgagaagtggcgtctagcgattatgaacacagtcagaccagtgatatattaacctttggttcatcacactgtgccattatcaatttcggtctgacctacgtcgtattgcaagctcttttcgtgtaatcttctgaggtcggtctacaatttgcttatgacgtggtttgccacggactaattcacccatgaacaggtgataggaaaaacaaaatgcataatcatgcgatgttccagctctgtagagttcaactcaacattggagatgacgatctgtacaaccgtctgggactaatgcacctctgaccttaatgtcatctccggtatcctaaataggtttgccgaaagccaatgtacgaagttcccaagcccagcatgatcttcaccataaaccgtcaacgaacactgagaactcagcggatttcacaaaggatacggctcccatcttagcgagcagaaggtaagggatatgtctagtgacgtggagagggcgcgtcgaagtgcatgaatgcatagtgagatagattaaatgattggcaaatcgaacactcaaactctcacgattatgacttgttcaaagattctgtacaccagcagggaactcgtctgtataatgcccgatgtcgatcccgacaggcaacaatatatcagcctccagagttacacgcatgcgcttacttacagctgatccgttctgccgatctagcgatcaaacgtctatccaaatgatctacagagtactgtccatctggtttctaataatagtgagctacccaagttgcacaggccttgggttggatttctagggcgaagcaattccttctgcctgatcgatgatagatggttgcaggaacggacagacacttttggatcgatactaatgggattccttgctcaataaccgcctttggggatctgtttggattatacatagatttcttgtcgccagatacatcaataatccgaatatggcaatatctattgtatgcctttaccctttggcgaatacctatacagtttatcatagacatgtacgaaagcaagataattaaagataaccgtggcaagctcactaacgacttgcccagtgttggtggggaccggataacaaattgtagggctttaggtatcttttgtttaccaattccatacaaaaggtacatagacccaacatggtcgtaatgtcaattttctcaagttaggaagaatgtaagaaggtatatgtagtgtaaatgaaggttcaatcgctgaattacctagttagtatcgacgttggtaagaattaagcagtattcgttgacacggtgagcggggggctggaaacgacgtgtcaagaggcggctatgcttcgaagccactttggagcacttgctctacatctgctattgaaggctcaattttgctaccgaagttttatttctcactctctaactctatcataactcggtcgtaaaaacccagctttccaacactagtatacgccccataagaatacgctatagcctggttcctcttgctgctgaggcaagacgagagtaggctgtcttgaagctcggctaattttaccatttcgatatactctcctcgctcgcgccacatttctcgtagttcctcatcaagcggctgcccatcctggtcgtatttttgaggcaggtcaaaggagacgggcatggctgtaaggaagtcggggaacgcgatgagctcatagggaactgtgcatgcaccttcccaatcgatgattcccgtgacatcgaaggtattttcatccactatgatgttactgtggagaaagtcatcatgatccagagggaatggtcctttgtcatataaggatagccggctagctatcgctttgatctgcgatgggaagttctcgataatggctaccatccgttccgccgggattggacctctctgcatcatgcgtgtgattgtttctttatcccacttaaacttgacgctgtcagcccacgcctcgaagaatgcggttgctgtgtcgaacggaccgccgattcccggcaagggaccacactcgaatccaccctcgctgttccggacaatcgcaccaatttgggggagtcgtaaggaagtcaactggacctacgatataaagtgagcggctaagcaacggagcgagcctataggccgggacaggggacgaacatgacactttgcgacagagcggtagaagttttgtcggtgctctttaggtatcacaccacgatgggcctcgtagccgcctagggcgtccatagcgacgctgccggggagcagctccatcagtataaaggcgacgcccaccgaattgttctcgtcaaattcatacgcaaaaacttgaggcaccggtaagctggaatgttccttgatgaattgcattgttgcaacttcgcttttaagcttggtgctgctaacaagggaggaagtgtttcttctaatatgaacccgggccgcccagcgagtcttatcggggaattccagcaaacggacaatattattgagcccgcttgcaacctggtccaaggccacgcactttaaatggccagaaagacctgaagcaattcgacagagctcattccattgaattcgatcgaaacagtcggcggtttggctgtcacaatcttgcagaaaaccctggacggtagtccacgaggttgagtcggtagacataaccactggacagaagacagttgacggagtagaggtagggatcgaaatctgctaggactcgaggggagcaagagtgggatatagttttgctcgtaggcttcataggacaaagaaaagaacggtagactgaattagcggtgtgatttagtggcaggtaccaactgggtacgtgcacacggtatcattcaggggaataaaggccagaaggaaagcgagaggatgaaatcaatcgagtcaaaaggaagcggcgaaagactaggcctagttccaagataactacgagacagagaggtcgctttggtatcgacgttggtaaagattaagcagtatgcgcgaagcaagaaaacggctctctttgatatagatgtggtgctttttaggtactctttgcacttctatataacacattcgaaatcaaggttagcagtaaaacaataaactagacttgccttacctcttcgttcttttctcgttaagctaggttgagatgttatgctttatgtatgttgtgcctatgtaccttttgtatgtagttgccatacaaaagatacttaatcttaacaatatcatatctggtgaaaatatgctatcgagcgatgcccatcaacagctaggtgctggtgaatgtgcaaccttgatggagatgagattgatggtcttcatccactttaccttcacaactgcgtagtctaagaatgtacagagggaaatagcgacatcctggaccccaggcatttgattggttcagcatattgaccaattcaccgccttgctctccgcctctttcctaatacttttcgttttcttctctcatactattcaagtgattcaagtctgacctatttgacctctaataataggggaatgttgtaatgagaatgatctctaaggccttcagatgtcctgccccttcctaatgttatagctagaaggacgatgtattgattacatatgtaaacggatcgttgtaaaccggagaataacggtgaaaagcatggttcctacaaaactggcctacaatatacaacatgcgatcacttgatctatgatacttgatcttatggaaacccgatggaaacccgatattcttctgccaccaatcaaataccagttgtccaatgtgccgctatcctcctccgtacaggaatatagataggtcgtctcgcagtgatggagtagtgtttccttgttgtctttgggtatttgtcatgataattacatatctattaggagagtaagccaaatggcatattacatcttccatcagatcacagaggtaaaaatgaatctgttgcgccgaagaatctaagctggttgagaacttgagatcgagacacgacgaaatttctagacgcattgaaccaatccccagaaaagtccatgggtgtcaatctgggaagtggctaaggtcagaagtaccaatcccctgccactgacgtcaaatgtcttgggctctaatatatataacctggcacaccccttcctctctgagatcgcaatcttcccaaaccagcccatagataaaatccatatccacttcatatcttaattaattcataggtgccatatcccacgaataagacgcaagtacgatgtcgacatgcaggatccttcgtggctggtaacacattcctgaagtgcgcaggaccccttccccagccatcatacctgacctactccagacttttacatttccaatagctataggccttttatcccatacaagatcatgtgtgctgcatacattccacggaaatccagtctcgatatgtatgcggagccttggaataaacgtgttccccttcctaacagcccacgtctggaatgaagccatcgtgagaaaagatcccgatcccggccgttccggcttccagtacggtatgtataaaggatcgtgaatagggcgagaatcgcagattcgggtatctttctccttgaatattgagcttccatatcattatctgtggtcattcctagatactactgaatccaactacatcttgcagaggactagaactagaccaacgcataccaatccaccatgttggacttgaagagcctatttccgacggtgacagcgttcattgcatttatacttaccctcctatgtctcttcgcggggacgcagagaaacttcctcgaagacgtggatctcttgacggtaagtccgatcgtcaccaactactctacaagtggcggatggttgcatgagactgacttggcgcggcctatcatctagctctatacacccgcagacaccgcaggaaccgccagcagtggagcccatgatttctattccatccacgtcatgtcctactgccaggggacactggtaacgctcgaccccgggacagaagtcacgcgcaacgtgactgaatgctcgaaccgcacgattctatcctcatttgacccgacacaagcctggccgaaggagatcacctccagccaggacctgggatgggcacgcgtaatcagcgatgacttccacgccttcagaatgacaagccaggtcatggccgtgatgtactgtatcggagttggcgcgatgggtgctgcgattctcgtacgagtatggactacactttccccgcgcgcaggccagggcctatttgaattttcgtttttcatggtgagttacataccacgatctggtgatggagttacccccttacataaactccggtctctgcatatcgtctgtgcagactgcacttcccagttcagcgtggtgcattttttcggatttcagatttccccagaaggcatgacaaatggctgacacgggattcatgattaagctcggatcttttagcatcagcatcgcgtccatcatcgcaactgttatcgcgtttgaattcgtcgctctaattaatgctcacggcaagggctcgaacgtgtcggcccattacggcgagagattcctcgggatgagttgggccgcggtggggctggtgctcgccggtagcgtttcttgcttcgtgaatgtctttgtttacaaacgggctgcgtatgcgcctgcgcccgcctcgaaggatatagaggggtaatcagtaccggaaaagaaaaggagagaagaagggagcggtggtggtagccagtcggagagcgcaggtttcagacggggggcggacgtcggggaaactcgcaacgaatataatcccatacaatatagatagaagagccatttatgaatcgaacgataccatattaaggaataccaccttaaggataccttaggactatcctaacatagaatagtcaatctaactagaagtcgtttcaagggaaattgcaaagttgctaatccggccacttgcttttgcgggatatctgagggttttcgtgttgggccaatggccgggcccagtaccgcgagagttaggcttttccccccttaactcccaggggctaagatatggagtgttgggcagtgcaaggcagcaatctccttagtttgctccgagcctacctaggtagagcgtagaaggcgatagatacacttcgaaataaacacctcggctggatcagacttggccgcgactaagtgggaaaaaaatgggtcggggctatcaaccgttcatccgacgtcaccacatagtgggtatcagttgggtctatggagggtcttttgactatcgtgaatagtctcgaatattcttgaaataaccacatgttataccgcaaaccaactattcaggactcaagacattctcaatacattccgtataatggctcagactccgaggaccactgtactccgttaactcttcccggtttgtcggctgattttctccgaagtctacatttgccaaggttcttgtcaaagcgcgaagtatttgacggagtatgggcgggttttcccggttcttttcttttgttttgccggtgagtggtttcaggccgtgtgtgatttgcgcatgaagtgaaacctataagttactcagataggaatagtgtattgggttatgcctctattgcgcggtatattccaaggttgggagtatgggagtatggttgcacggacattaaagtgggggggaagaagggtaacatcttcaataatctttgtttagaatgttagagagaattatagaatattaaatacggaataatattcgaataataacaaataataaaaaccgattcataatgtcctcatcttatgactggttgaaaacaaggcggaggctagtcccgcccagatgtgaagtcatcgtcatagtcctagggaacagggacaaattccttgtatagtttccaaggtcgttctttcccatattccccctctttccttaaatagttgcactttcccccttgaactggaaagtgcaactgacacttcctctttggttcctctacttttactctcacttccacttccacttccacttccactctccttctccttctccttctccttctactcaacctctacccacttctacttacctgtacttctacttacctgtacttctacttccacttttcgtatcaaccatggagaagaaagctgttcacttcggtggtggaaacatcggccgtggcttcgtggccgagttcctccacactgctggctatgaggtcgtcttcgttgatgtcatggacagtatcatcactgccctacaaaacacaaagtcctacgaggtcactgaagtcagtgacgagggcgaggctaccaagaccatcaccaactaccgtgccatcaactccaagacccatgagagcgatgtcatcaacgaaatctcaaccgctaccgttgtcacctgcgctgtgggcccgaacatcctcaagttcattgcccctgcgattgccaagggcatcgatgcccgcaccgccgccacaccgttggccgtcattgcctgtgagaacgccatcggagccactgacactctacaccatttcatcaaagacaacaccgctcaagaccgtctcggctctatgccagaccgagcccgctttgctaactcggccatcgaccgtattgtgcctggccaggccgccgacagcggtctcaacgtgcgcatcgagaagttctatgaatgggctgtggagtcgacgcctttcggcgagtttggtcacccagatatcccggctatccactgggttagcgacctggagccctacattgagcgcaagttgttcactgtcaacaccggtcacgccactgcagcctactatggctacaatgccggcaagaagaccattgccgaagctctccacgactctcgcatccgcggcattgtccgtgatgtgcttcaagagactgcctccctcatcatcgacaaacatgaaatcagcgccgctgagcagcaagagtatgtcgagaccattatcacccgaatctctaacccctacctcgaagacaccgtggagcgcgtgggtcgcgccccaatgcgcaaagtgtcccgcaaagagcgtttcatcggcccggcttcgcagctggccgagcgtggcggaaagttccagtcattgctgggctccttggaaatggctctgcggttccagaatgtggaaggtgacgaggagagtgtggagctggccaagatcctcaaggagaacgcgcctgctgatgctgctgtccgattgaccggcttggaccgagaccaccccctcttcccccatgtggtcaaggtcgtggacggcgtgcaatctgacgcaaagtaggcacctctttctcacgccagcctcaacaacatcctaacaccaatttttcagagaggcagggcaaccgcgcatttgatttcgctctgattgaaattcaacttgcatgaaatatcgcgaataccaggtacacggcgcgggagtaatgggagcagtgtttatatgactttatgaattgtagtatgactagcgaatggagcatcgaatcttatttttaatcctttctcccagtctacatatgtacaaagtaatctcacagcttactatcaacccaaacaggcttcctcttctccacaaaagcccgaagtccctccttaatattctccccctcattcaacctcttaacccacgtctcattcaacatcgccgtagcctcatccgccccaatcccctcccaccccaacttaacaccctcacgactaacaagcaccgaatcaggactattccccgcaatctccccagcaaccttcaaagccttccccaaaacagcccgaccaacctcctcctccccgaccccgtcaccaacaacaacaacagaattaacaagcccccatttctccgcctccacaggcccaaccatccgccccgtaagaaccatctccatagcccgctgcttgcccaccgtccgcacaagtcgcggcaacgccccagcaagcgcaacaaccccgcgcttcacctccggcaacccgaataccgctcgcgatgacgcaatcactatgtcgctgttgatgatcatctccgtcccaccgccaagacagagtccgttcaccgcgcaaatcacaggcttcttgccctttcgtcgggccagtccgccgaatccgctgtttggcatggtggttttggttgaggttgacgaggtgcggttgttccattctgatggagttagcgggttcaatggatggatcggtttcggggaccttgggaggtgtgtgtgattgtgtgtgttttgcacaaagtatactagccactctgttgggtctgctgtggctcaccttttagatcggcgccggcgcaaaatgcccgtccctttcccgttagaatgcccacgcgcatgctcggctcttcgtcgagccattcccatactgcgtggaggtctgcgtggccttgggagtttatgcagttcagatcgcggggtcggtttagcgttacgaggaggatgtggggtgctgggtaggagagggttgcgtcggctggggttgggggttggattgtgaagggtggcatcttgatctttcttgggggcttgctgggagattgattttgagcgaggagagaagaaaaaaagaatggaggaaatggtattgaaaagtagtgatcgacggggagttgggggttatttgtagatgcggagaagctatgccgaggaccgaggagtgtggggggtgattactgcagctctcttggatggctttgggagttatatttgtcgaactattttgtttagacttgtacatgatccataggttactatttattgtataattgtgcgaattacaggtgatattctacctgtgacttatgttgacaagttctgagatgaacacatccacccatctcccaagttccctatgaacgccgaaaagaaacgctcccgaacaaaatcacaaatagatttggatatcaataagctaagaagcgattacagcgtacaatggatctggcgcacctacgccttgttgatccaaccgctgtgtaccatgaaatcataaatgcggctggttttggtgccctcaatctagcggagtcagtaaaggacttgcatctcaatcaagagtcaagtagaaacataccttgcagattatccgcgcatctttcttcttcaggttgccgccctgcttcattgcttctttcaacagcgtctccttgacgaccagatacggcttcggcatcagacgtagaacattgcacacctctgcctcttccttggtcaggagatgtaagtcggcagcagtgtcattgtccagcttccacgacggcattccgctgagtggcggcaccacatatttcgtctttgccggctgcgggggaggcacatccccatcgacagcgaaggcgcgatcgaaatcgttcaatggttcatcgccaggatccgccggtgcgtgcgggttggcagctttttgcagtcgcagcggcagttcaggcgtggtgagctgtgttgctgccgctggtgtctctgtcagctgtccctgcttggggcgggtactggcgaaacggtcaaatgagccttgaggaagcagtcgttgcacgcgctgttgcttatcctgctcgtacttctcgcctgctttcaggtcaccgatgcccatctgccgccattcttggagctgggagatggctaggcggaggttgtgctcgtattccaggcctttgttgaggtcttcaaagtccttgcaattcatcatccgtgctagtggctttgctttgttcaacaaatctcgctcttccttcgatcgtttcttatctaaggcggtgttctttcggtattcgaggaggttgtgctcgaagaggatcttcttgcgctctgtacgcgccgtcaagcgggagttgtaaatgtcaaccacggtcatcttgagctcagtctctgcgtctggctcgccattctcattgagtccagccccgggctcaaaagtcatgtgctgcactgcttcttcggcatcgttcaggaactcggtctcaaactctaatcgtcccggcatgtagccctgcacttcgtgacatgccggtacactggcagtcggcttctgctttggtgtggttggaggtgctgccttggctgcatctttgcgttcttcgatgcgacgtttcttgcgtgtttggaactcctctttggagattgaatcctgcaaggctctatcgtctggatcggcgcgggctgcgagcgggaagttcacactcttcacataggtgtcgtaatagtggtctcgcacttcatccttgctccggtagccgccaatgtggtccgcgatgtctgcccaggaacccaacccatagatttcggcgccttccagcaatagcaattcttcatcggcaccccattccccctggaatatggggactgagttctgttcgatcacttggaatggatgtgtggcggggtcgtggtttttggagttctttccggctgagaagcaggggacacagaggtcatattcggggcaggcgggatgcgaacatgagatgcgaacctatgcgatggagtcgcgttagtctctgagtaaaaataacagaccttcaagtggtcatggcacaaccacgccgagacttactgttgacgtaacatcaatagagcacacatcgcagtggaacttggtgccggcctcggtgccgcgcgaggcggtcttcttgcgtatcacacccattagccctccacccctatcatcctccgctttgtcgggtgctgtattgatagcaacagactccgaagtctgaaaatactagagttgcaggtgacaagttgaggtgaggtctttcggggtaggtgttctccgcacttcggagcggggaatatccggaaacttgaaagaacagatagaatgatacagctacaagccaagctgaaattcaaactctcttcgtcttgtggagctgctttggattgttaatgccgtgggggaagttgatgcgtcgttaacccttgtggcggagcagtggctgagctgattaattactgtacctggatgtgactggtatgttaccagcttgaccaatcaaacaccagattctaagtaatctataataagaccatgtattataattacagggggaacttcccctctctcattctcatttgatcttcgatctcgactcttttcttatcctttagttgtgcttccatacggatttcaaaagctatagtggtggtctttgtcttgacttctctccttttgcgtgtgttatctgtgttcttgtgtctcctttgctttgggggccattcacatattattgggtgtgattcttaccctgcacacgcattacggcaccttggactttgatctcttcatctcgatatctttacaaccgccactatgtcctcctggaagctcactaaaagtatgtttactggcagttggtctccctctctctcccctcaataccgctctctgcactgcagtaatgtccacagtcgctaatgatacaacttgtctcaagagttgaaggagacgcatctggcacccttgaccgcatcatttggccggtcgtcctctacttcgacgatcaagggtgactcaaatggtgaagaggccccgacgcctgtgtcctcaaacccgccctccgccaccccatcagtgaacgggatcggtatgttattcatatactactggaattcccctcggtaactaataacttcgtcatttgaatagcggcctccgagtctcttgtttctccccctgtggcgcctgtgaacccaggaatccttattgtcactctccacgaagggcgcaatttttcgctgtcgcctcacttccaacagatcttcaattcgcatttccaaaataactcttacgcgccctcttctctacgcccaagcacatcctcatcgtcacattcaactcagaaccaagcgggttcctttgtgccatccggccgaccgcagtccacaagcgggggcatcaatgccgcccccactatccacggtcgctattccaccaaatacctgccgtatgccctcctcgactttgaaaagaaccaggtctttgtggatgccgtgtctggaactccagagtgcccattgtgggctggggacaacacagccttcaagtttgatgtgtcccgaaagaccgagttgaatgtacagttgtatctgcgcaaccctgcagcccggcctggtgccggacggagtgaggatatcttcttgggcgcatgcaaggtcaaccctcgcttcgaagagagccagccgtatgtggaggatccgaaactcagcaagaaagataaccagaaggccgccgcagctcatgacgagcaagggcgtcaactgggtcagcagggtgctgaatggctggatctccaatttggagttggctcagtcaagattggtatttcctttgtggagaacaagcagcggagtcttaagttagaagactttgatttactcaaggtcgtgggcaagggtagtttcggcaaggtcatgcaggtcatgtaggtggtgtcaagttctgcttgtctgagttcaaaatgctaacagtcggggaatcacaggaagaaggatactggtcggatctacgccctcaagacaatccgcaaggctcacattatctcgcggtcggaagtcacgcacacacttgccgagcgatcggttcttgcacagatcaacaacccatttattgttccactgaagttctcgttccagtcgcctgagaagttgtacttcgtgctggcatttgtgaacggtggcgagttgttccatcatttgcaaagggaacaacgatttgatatcaaccgagcccgtttctataccgcagagttgctgtgcgctctcgagtgtctgcacgggtttaaggtcatctatcgcgatctcaagcctgagaacattcttctcgattacacagggcatatcgccctttgcgatttcggtctctgcaagctggacatgaaagacgaagaccggaccaatagtaagatcttctcatgatccatgataagccctatatagctaaccagacccagcgttctgtggaacacccgaatatctcgccccagaacttctccttggcaacggctacaccaagactgtggattggtggactctcggtgtcttgctctatgagatgttgacaggcctgcctccattctacgatgagaacaccaacgaaatgtaccgcaagatcttgcaggagcctctgaccttccccagcagcgacattgtcccgcctgctgcacgagatcttctcagtcggttgttggaccgtgaccccgtgcgccgattgggtgccaacggtgctgcggagatcaagtctcaccacttctttgccaacatcgactggcgcaagcttctccagaggaagtacgaacccagtttccgaccaaacgtggtatgtattctttgctcccgaccatgtatctcaacatataactaacttgatgcaggtggatgcccgtgatactgaaaacttcgatgttgaattcactagggaagcaccccaggactcatatgtcgatgggcccgtcctgtcgcagaccatgcagcaacagttcgccggatggtcgtacaaccgacccgtggctggcctcggcgatgcaggcggcagtgttaaagacccgtccttcggtagcatcccggagtagagtctctcgccgcgtcaaactagaccaagtattcccggtgcaagaaagagagaataggaggttcatagagaccattcccctttttaacttcgtatatgttctttcattaacatatcaaccaatcttgatctcttttcctttttttcgctctgttcgtcatattgttcgttttcccatcacaaaggagtctgtggcatcttgatatcggagtcgcttctgatcttcgagccgacatctttttcttctcgtttcatacggccgttgagcgctttgatttgattttcttgtcttgttcggtcatctcccttctatctcaagtgttcattctctccaggcaggttcctttcttaccccatggtttcattgctcttctcaagcggtcatcgtctgtacccttgttctgtattctcgataaaactttacaatgggcaatgccaaacacttcgactatgttcgtcaccgagtaactcggatcaacccctgatggctgagcggttttagatgcatagtaaattcgattcatatgctaactgaggtggaagtcttgattcttgccagctttcgggtccatctgggcactgttttgtattcttatttaaatgtaatatgtgcctgttcttatgtttactacttaacacttacgtatgcagaagcctctatgtactaacagctatacaagccagatacataggcaagcaccaggaacatccggtatagtatacatatacaataatctagtaaatcaaccaagaaaccactggaaatagaggggaacatattgcttgtatctaggcatgtaatttgctctagagacacatgacagcgcaattacaaataagaaaaggaaaaaaaaagtcggacacacgttaagacgccgctcgcaatcaagaatgaactgactggtcagccagaaaacaaacgatcaacctaactctcctggaaagtcaccacacagaaacccggtgctttttgttcgtctactcggcttcagcagcatcggcctcgtccactgcagccttctcggctttctctacctcctcagccgcctcgactgtaccgttgggcgcactggcgggctcttcatcgtcatcgccgttgacatcaatcagggacgcagaggaagggggctcggggacggcaccctccttctctaggcgaatgtactcatcccactcggggaagaggtcgtcatcggtagaggcgacgtcaggggcaccgggtgggacaccgatgaggcgggcaaccttggtcttgccagattgctctagggattccttccattggacaacgaggttaggggcgctcgagggcttgtaggtctgcgcgaaaaggacggcttcggcgatccggttggtctggatgaggagagcgatgcagccatcaatatctcccagagaccacaaagtggagaaggcaacattgtggaggcctgactctgaggcctggccggccagggccttgaggccttcacggttgttgctggcggtgtgcaacagtagcaaagaaccaacatccttggcgttggtgaagcactcttgggcaagagcaagattccagccggcaagggcagcatcaccgacgatcttccacttgtgctcgacgttggcctcgcgggcaatcgtgagcgcggtctcaagatcgctcagcgcaagggccagctcgaagcggtgctcggggtccgtggccacttccagggccatttccttatatccttggccttcgaggaaacgggcgaccttgttcatctggtcttggggcacgtccttgaggagctcagatgccatttccatatcgccgcgcagcaccactgtttggtattcaaccatgctgagagaaaggccgaaggagacggcattgacgtccttgtcggcaaggtagatacggccatcccggggcaggtagccaagaacatacatcggttggtcgaagtgagagattgtgtaggtctggtcaccaacaaggtaattcaggcggttcgtagagttggtgtagatgaagcaatccccaacccactgtccagtccggacggtctcgttgattgtagcaaccaactcaacagccgcctcaactccatcctcgtcggcttcaccggcgttcaggccattgatatactcctcgcgagagtagcgaagaacatagaaatcttcttcacaggcaagggtaacgagctcaccagattcggaccagtagacctgtacatgtcaattagcatgatttccaaagatcaaggctgaacaaataacttacggatttcgggtcagcttcaattctccgaaccaggctgccagtctcccaatcaaagaatccaatgccaccttgacccttgacacccagaagaacaccatcagacaggccctcggcttggaacccaacatcaagaccggcgctctgctccttgaagttcttgaaaatctttacacttgtcgatgactcccgaatagcgtaatcgttgctgttgtctttcgcaccccaggcaaaatcgagagcctgtccaaaggccttgtttctccacgccaatgcggtgtagatgatgtattctccatcaccacagacggaaacaaaacgtccattgggggagtgtgacagagtctgcgggtacacctcgcactgtcccaaatcctttgttggtagagaaagaggctcgccgtccttgacactagcatccccgcccttgatcactgacgacacgacctcactgtgtctcgcccagataagcttaccagacccatccattgagacggcgggctcttcccggcccatcttcaccacaacagcaccatcgtcgaaacccatcgcaattccctgtctaccccgctggtatgagacacaccatgctcgttctagaccatagcttaatgactgctccaggcggtacgtgtttgcgtgccaaatcttaatggttccatcttcagaacctgagatgatcacagggagttcggggtgatagcaggcgaatgagacattgcttgtgtggccctcgagggttgcaatgagtgctttcgtggtgtagtcccaaatcttgacggtcttgtcatcggaggtggtgaggatgtatggcttatcagcctgtgggtagtagtcgacatggttaacacctttcgtttcgtgggcttcgagtgtgaagttggcatggggagagccgaggttccagatcttcacggtccggtccaaacacgcggaggcgaaagtgttggtatcctttgggttgatcgccatgcccataacatagtggctatggccttcgaacacttgtacgcacttccagcccttctcccagtcccaaagcttaattgtcatgtcatcggaggctgtgagcacaaacggctgggtggggtggacggcaatagaacggatgtaatccgggtgtgcttcaaaggacgtgattttttcggatgtgttgtagttgtagacccggagctggaagtcatctgaaccgcatacaatccagttcttccgcgcaatgaatcgaccggcacgaacggggacatcggtgagttcgaaggttttgatgatagactagagggcagaagatttagataaaagtattgggactgtgaatctgtgccgactcttacctgcgattcgtaagaccagatgtagacatgacctatacaggaaagtaattagcgcgttgggcatctcgcatactgcccctctcttagcataccgctatacaaggtcgtcaagatctaagaaaggaattagtttgagcaaagttaccgagtggattgtaaaagcttacccagggctctgtagggtggaaatcaatcccctttacccgctcggagcgggcaaatagctgcctctgtaacatctatcgtcagcaatccctccaattgtggacatccacctgcgggatcatattgtggtatctgctggagagcggatccgcaagtatatgaagcatttcatcgtctgaatttgcgtaccttgacgtcgagccgcatgttgtgtgggggatgagacgagttgtgtgatgcggtgttggtcctgtgacagcgataggggatttcgcgagccgctcagacagcccgatgatagggaggagcgatcctcggagcaagttattaattggaggaattagtaaaggattgagatgaaggagagctagagggagagcgcttcattcagggacagcaatgtatgtgtccacaagggattcccgccttggctcaccgccttccagtctatccactatacaaatatccgacgaagtatacggagttcatattcatttgtattgaagaaagctatactgattttctatgcgaggttagcggaatatattccttgtcaaattaaggaacaggacaaaggagcaatagcccaaataatagctcaaatacctccgatatgctcccctgtacataagcatcgccctggtgtatgagcttggaactagaagaccaatgacctctatactatattattagggagatgtctcaattacaacgaccattatctcaagaaaaatagataagtgacgttggtttgttgtcgaatacaagaatcgtagcctaggagctatacgactacctcaaagcttcagatggttgaactctcaaaacctgtattcaaacaaagagacctctagtagtagttacagagattaaaatccacagccattccagaagggctgtctagttaccacgctcgaagtaagtccactggccgggttggggcttctcttcgagttcctcccacctataatagtgtcagcagtaagtctaggtagactccgaacttcgaatttccacttacaccttagatttggccagctcatccacaagcttgagttctgcctctgcgacctggatgacctcttcgataagtccggcgccgatttgctgttcaacgtgagagatcctgcgcaaagaggttagcgttctattgtctaattgttcatggccaattcagctatgcaggtacacgtactggtcggcatcaagggcaggctcgctctcccatttcatatcttcgtggtagaagtcatgctgggccttgtcggtggtctcgctggcctcgttcatgatcttagcccattccgcttcttgttgcggggtacgggcgggaccctcagttgtggctgagaggccttcgccatcccattcttcaccgcgagcattgtcggatccatccttctgttgggcagcggcatgggtgtaggtgccgtcggtgcgctggaccttggcgaatcgctcaggttcggctcccacggtcttgcgcacacgctccagccaggcatcgaatccggcaggcttttgcgattcaacgacttggaggcggtggcgggtcaaagcttcaacggattggcggtaggcggaggattcggggaacgcctgcaacttctgcagagtagtcgagtaaaggtagatgagagtagggcgagggctggggtgggtgaaaaggcccgtcaatccggtgggagcaaaaggctccaaataccggggcttgacattggccagtagccgaagtgtagagcgcattgtgaatggacttggtgatattggggtcggtctgttccagggagatgaagtgttgaagtcggcccggagcggattaaccttatgttccacccccgaacggcaaggggaaaggcaacaactcaccttttccgataccatcaaagcctcacatctggttctttgtttgggctgtgtgcagttctactttgctctcagctacggggcgctatagtcgctaagtgctgtttctttctgcgacgtgaccagtgcccacccgagtcgccagtcttcgcccccgtccaatgtgccacctgtaacacttcgcgattatcttccctgcctcgaccagagtccttcgttttgctcaactgcgacatcttgaaactacatatactctcttttaaactactacccggttattcgcctttccttccgccaaaatgaaaccgtcttggctggggtggtccctcctctcactgttggtagcgcctgctttgggcacgccttcagatgcttcctccgaccaagaatctggagatgcacttgtcaagaggggaggtcgcggagtggattccgacacccccacaacattcaatgatatcaaagtgcccccgttgacgcagctgacccccgagaatttcgaggaagtgaccaaagatggttactggtgagaaccccttctgcagcaaccaataaaccgctcagggctctaactcttctaggatgattaaacattattcccccacctgtccgcattgccgcacggccgctccaatgtaccagaccctgtacgagtactactacgtgagtatattccattgttctgaacatttgaggcttggatctgattagtggtagacctcaaatcccttattcctctccggactgaagcccggggagctcgcctctctggactcgtttaccggctactataatctccatttcgggtcgataaactgcctggccttcggcgatttctgcacgaagttgaacgtcgaattcttccccgcgtgggcattctacgatatgggcgttcagaacggacgccctgttggtgccaagacgatgtcagagattgccgctatgattgaagccaagctcgagacgatcaagcctgggtcccgaccttcgcaaggcgtccaaatcccaaaggccggcgctaagagcatggaaatgactgccaaacctgaagtggtgaagcctggcgcgaaaacagctgtcgagaagcagagcatcgaaaccgcagaattggaaggcgttagcccagaatctgtcaaggccaagctccaaggacggcctgctaatccccagggtgtttccatcccactcactgctgaaagcttccaaagtctcgtaacgactacacatgatccctggatcattaagttttacgtcccttggtgccatcattgccaggctctggccccgaattggaactcgatggccaaggaaatgaaggataccctcaatgttggcgaagtgaactgcgatcttgagaagcgactgtgtgaggatgctcgcgtgaatgcctacccaacgatctacttcttccgtggcggcgaaagagttgaatataccggtcttcgtggcttgggagatctgatcgcgtacaccaacaaagccgtcggtgtgggctcgagcattcaggatgttgacgcgactacttttaagcggttggaagaaaccgaagaggttttgttcttgtatctctacgaccacgcgactacgtctgaagattttgaggctatgaaccgcctcaccctcagtcttgtgggacacgctcgcattgtcaagtccgacagtgctgctctttccgagcggttcaagatctctacctggccgcgtcttctggtcgtccgtgacggacgtcccaactattacaatgcccttgctcctaaggacatgagagatttccgtcagattctctcgtggatgcaaactgtgtggctgcccatcgtacctgagctcaccgcatccaatgcgcaagaaatcatgaatggaaagttcgtcgttctgggactcctcagccggcgccgtagcgatgacttcaagcaatctaagcgcgagctgaaggaagccgcccttgaatggatggacaagcaggttcaattgttccgccttgagcgggctgaacttcgtgattccaagcaactgcgtatcgaagaagccgatgaccgtaatgatcagcgtgcactgcgggctgcgaagaacatgcgtattacgatccgcgaggacgacaagaagcaagtcgcattcgcctgggtcgatggcgacttctgggagcgctggctgcgaacaacttacggcatcgacgtggagaacagtgaccgcgttattatcaatgatcaagatgtaagtcttcccccacgagattgctcgagccctataactgacctcctatagaaccgccgctactgggatactgcttcaagtggagctcctattatggcctcgcggacctccattctcgagaccattcctctcgtcgtcgcttccccttcgaagttgtcacccaaatctaccatcggcacctttgagactatcttattcttcactcggtctctcctcggcagtcaccctattctcttcttcattatcttgggtgccgttgttgctgtggccaccattttcgggcgtggacgccttagacgtggtgctgcgcgcggcggcatcattggcaacaccaacaacaacggtggcttcttccacctggacggcaaggagggtttcctcaatggaggctcgaccgacaaagtcgactaatgagacaaatgtacagttagggtgtttggctacgtggttcttataatctctttgtttccactgtatctgggtgatgctgctttccttttgtgcgtctcttcgatcatttctgtcccagttgaatttcttgcatgtcagaccaaggggttttttgaagcacatatcttcttattccatttcttttcagccatcacatgaacttttggagtctaggcgtatcagcttctccggagccgcaaaaaagcatcctaatttcaagtcaataaacgtattaatatcgcttagtttctctggtcgacaagtaattatggttacctcatttgccccttcttttgccatctattttaggtttttcttcgacgcgattttccagctgtgatgctttagtttagcgaaaattgaataggttactctcccaaataatcgttgacttgatctcatacttcgaaaattgaacgaaaacaattacacctcctctgattggccactggctttggggtcacgtgccaactcgggcactcccggttttcgtcgaccaccaagtgccagctcctgtctcctagcaattgtcccaccaaatcacttcggtgtcattcaagatggtaagtaattctatacccagaagatcagaggaccttgtattatcttccgaggtttcttacctactcggccgcgcactccgggtagaggacagtcgggccatgagtatcacaaccggcttccgagctccggaatgagacgagatagacgatgtcgcatcaatgctaacacatatcccatagttcgcccctactgctcgccgcgctgcggcccaggcctccgcctatgcgcccaagtgagactcccccatatcctttccctcgaatcccggacagtacatgtttgtcggtgataagcatatcggatggagcgaatgaaacatacattgtgctcgccaacgaaaatttcttagttgattggatgcccacttcctctcgcgcagcggagcttgacgggtgtctggcatctgtgggggagcggggattttggcaaaagagctggatatcgaagagggcagatcaatcaaacaacaagaacaccaagctaacgtctcactaatcttcaggtactacattccccgcaccgccgccggtatgacccttcccacagccgtccagctgtgagtacatcccgcattcccccctcctaggttggacaagacgcagtggctaatgacattctaaacagtggttccctcgctgctggcttcggtgtcgccgttggctccggtgccctcttcctcttcggcgaggttccccgtgtgcgcaacgacatcctccgcaagcttcctttcctcgatacctactacgaccgtagcatcgcccctgaggacaacgtgagtcaattgcagtggatttggaggtttgttttctatgctgactttcttttagcccttctaaattattcgcaagggtatatacctgcctcccctttgatcgatatgaatcaggacttttgggtgggcaggctggggctgtactgtgtagaatagcgatgaaagtcttctctgtttttaataccgcatagaaacagttgtttccaagtaaatatgtatttcacggtccgtatgcttgattttacactatcgatatacaaccttcccttagattgtcgggctgaacagcctagagctcttagagactctgggactcttatataccttggaggttcgaatattccatggtttggttttcgagctagcaaggggtgacacttagatagcgttgccatcgtggactagatttaatgacattatatataacgaactaggttctccagcattcaatccacagcttcttttcccaacgaggcaagtccatccttagataacaagcctcaaaggacaaaagaagtcctggcgattttcagaaagcctgatacatacatatgtagctaatcaacacgaacgacacccgtggacgcccgagtcaagcccttatctctgttatcacgatgataaccacagctccaagtacagcgctaacgctctctcgcagaagtcccgtgaaggataacgcctggagtttccctgctgggactagagctctatctaccaagcttatagcaccgatcatcgaatccctgtgcatcaaatgagcggtggtattgcccttccctacaaatcacaagattgcggggtaaggccatccgcgtgcttgaataagatatctgtttattatgcagttcaatatatctttttaatttatcaacatccatggtcatttgctcttatcgcgcctctttgtaaggagcacattacggagagaccctgcttccacgaggcgtttccccctcacttgtccaccggtcttcgttgcacaatggtgtcgggtccaatgtctgttactcccagttcggactggctctattcctgctcgcttagacatatctacttggttattgagttcgccaatgcgcggggcaaaaggcaaattgtctcgtgctatgcatagataacgagctaccccctgtcatcctgctttatatatcataatccggggcccttttattctgcttcgtttccccttggccgttgcttgaagacgaagaaattcttgttcacccattgcatggtggtcatttcatttcattgatatatataccgcatacattagtagcgacacacctgtttatcttggccatgggcgcaaacatggagacccaaactgctgtttcggacatgtccaaaagacatcgtgaggctagaaatgcccaagtcacttccgttctcccggatggcgatgtgccctatacggaccatgatatggatgatgatgagagagtgatcacggcgctgggttacaagcaagagttcaagcgtgagttctcgctgtggacgactttctgcgtcagcttcgctgttctggggttgctaccatcgtttgcgagtaccctatggtatggtgagtactcacagatccgtgatcatacgatttgctatagagtatcgccgatattgattggtttaaaggaatgggatatgccggaacagcgggtatggtctggggctggatcattgctatgatatttatccagtgcattgcaatgtcgatggcagagctatgttcagcaatgccaactaggtatgatacgctgcccgatgtcacacccgagaagttggtgtttagagaagaaggctaatgtgttatacagcggtggactatactacgccgcggcagtcctcgcacccccaggctacgggccctttgccgcctggatcaccggctggtccaactggatcggacagataactgcagctccatcggtcgactactcgctcagcgcaatgatcctcgcagccgtctcaatctacaacccggactacgtaccgacgacatggcagaccttcctgctgacgaccctcataatggtactacacgctggaatcagcagcatgcccacgaagcgagtagcacagttcaactcatggggctcaacattcaacttcatcgcgctaatcgcagtcctcgtcatgatccccgctaacacgaaaaacagcccgaaattcaccccctccaaacaagtctggggcgagataacaaacctaaccgacttcccagacggcgtcgccgtactcatgaccttcgtcggcgtgatctggacaatgtccggctacgactcgccattccatttgagcgaggagtgctcgaacgcgaacattgcctcgccgcgcgcaatcgtgctcacctccggggtgggtgggttgatgggttggttcctacagctggttgttgcatacacggtgctggacatcgaggccgttcttgactccgatctgggacagccctgggcgtcctatttgctgcaggtcatgccacagaagacggctatggctatcttggctttgacgattgtctgtgggttttctatgggtcaggggtgtatggttgctgcgtcgcgggttacatatgcctatgctcgtgacgactgctttccgttctcaaattactggaagcaggtgcatccgtatacgcagacgccggttaatgcggttgtgctgaatgccgtcctcggcatcttgatgtgtcttcttattctggctggggacgtggcgattggcgctttgttctctattggtgccattgcgcagttctttgctttcgccgttcctatcactattcgggtgttctttgttggtgatcggttccgcaggggcccctggcatctgggtccctttagcccgtatatcggtggcgctggtgttgtatttgtgtttttcatggtcccgatcttgtgtttgcctagtgttactggtaaaaacttgacgcctgatctgatgaattggacttgccttgtttggggtgcgccgatgctggcggttacgatttggtgggttgttgatgcccatcgctggttcaaaggtcctgtggtcaatgtcgagcatgctatccatgggattgagcatgagccggtcgttagtgagggcattgagcctgagcttcgagagcccgatgaaactgctttgcccaaggcggatgatgcagataatcctatctaggtctcacgagttcgtggagaagtcacggtattagtctgcgatttaggatttgatgtttacgttcgtagtaagtgacttaatatcatagctacctcttgaagtattccttttgtgcgtcttagtttgataccttcagtcttctactagggtaagagtagatggatagtatcagccaaagagccttaacacgctcaattcaacgtatgtaagatgaaaatatccctacctccatgcagagacttctatctttaaaaagtagtgatggccccagatgaacccaccgacaagaatgtaagcattcgccacctgcatgtcagaaaatatagatatggctccataatatgtaccgatctgacagtatcacatggtgactgacccagtgcccctcctggcctgatttaggctatgtgatatgacggagaaaatggagcaaacccactactccaccagttccatatggctgaaataaggttgactgtatgagagctgtatggcattttactgggatgaaaacgatttcggattctttaacatctacgtgttctatcaaagggaggcagaataattggcattcttgcatatatatatatatatacaaatgcattaaggtcattcaaggaggatatagacctcaaggacacgccatattccactgtatattgtaaataatattatggtcattcgtattcaaagaaaaaagcaagagattattatgcaaaggatacatatactgcagaagaaacatgtaaattgctgatcgtctcttgcactttgtacatggtacctccacgcaaagggagaatatatactacttgccctcctaagagagcaccgaacaaaccaaccaatgcctagagcctgagagcaaggcagacaccaagcctgttatttaaaacccaactcaatccccaaagtacggaaaccaagcaatcacctccaccccacgggtaagtactttgtacaacgtgccttgatccccgggaagttggaatcctgtaagctccaccacccctgagaccccaccggcggtggtggacactgaacatggatgcaacggagaaaaacaaacaaaaagggttggaacagagatatgcttaatctgactccagatggggggtaacccacacccccaacacgaggagccatctgctagtcccacttgtatactacccttaccattttccgtgagatagttttccgcacgtaaaaaaaacttctatagttttcaatagtaagcagtacttatcatatttaaacttggagagcatatagtctggtacatcattttctcgaaggtcaaacctcggagaaatctaattgaaaaaagaaaaaaaggaagcctaaagcgcctccaaccacaagaaccgggacaagaatgcgaaaggttacaaaaagaacgtgttcggatgacccttgttgtacggagtacggagtacagcccctcttatccacgctcccgtccagattgcacgcagtcccgatcgtcactgtcaggggctgagagagaagggcccaggaacagccggagatcggcactacgtcatgacgaatccaaatgatttcccaaggtttgaaggactcaaattcccatggaatccatagacgttctgaggtccctggatttgagtggaccgtctggagtttctctttttggttctttgacagatctagcggtctgaaccatggatgaccttgaaaaattaaaagtggtcatcagagcgaattcgcaagtggctgtttttgggtcgggggtgagccgagtctaccgccgtattgtacgttacactttccatatcgggccccgttttgcctttttcccattgcgaactgatctttttttttttttttttttttttttttccttttttttgggtgacattatttgaggggattttattattaccaatgcttcggtccgatgggctgcattttaggcgctctaatttatgcaagttcgaagaaaacattgaatggttcaagcattcctgaatgttacactgcaaacagatggttcggcccgaccatggtctgtggatcgaagaatccaaggctcagaatatgaacttcccttactgttactatttgacaagaattggtagcgaggtcagtatcagatattaataggaggcgaatcatatatgcgtagccatcctaatatcgaattatatccgaaacccatgacgcggccaggagagaaggccactggtacacgttgattccaaggcgagggtgaggcaattacaatgtagaacattgaagaatatagaatggcaaattcgttcttgagctaccttgtcaatgtgagccctataaaccccatgttgtacagaatggattccgatccacagagcacatgggaaaatggagaaagatggagaattggagaatgggactgtgaccacccgtggactctttttgacattgacactccaaagtcaatttcaaagtcaacatcaaaccttgaatcttttgccaaatacgatatcccaatacgcccgcctataaccgatcataaaatataaaataaaataatgcaagtcagatccccaagaggaccttgtgaaaaaaaaagaaaataagaaacagctattcccattcgggtctcgactacagacatcggcagcctatgaggtcggtggcggcacgatcctctcgtccgctaaagcgggtggtggttcctgattggctgcatgaagtcctgaaactcggcgatccggacttggcttcagcggtgtttccggcctatgccgagaacaagctggccttgtgtgtatcggatgttggagagcgctatcggatgtgcgttgaatagagcgtatcgaacatgccgaccacatcattttttatattcaatattttcctgttaaatcatggctcgtgtggtttttgcatacgcgacgaacgtatatcccaccacgtgatataatattcggcagcgatggggactggggcgggatctacatctcgcgcgcgctattctctcctatcccggttgataatgatgccaacaacaccttaagcatccgggcactttagccctactggcggccccatttctgtcggtacacagtgggtttgttacatatggactcgaatacggccaagctcttcatggaaaggaaaaaacactgccaagtgataatcttaggctcatttgtacagactagtctaatacaagaacaaccagtaagtctcagtatcaaaataggaaataattagtaacaaaagaattgataacccctgatcggattcaaaatttaagactcggaaagcctcaccgtactttgcgaaccgtttcggtgacctggagtggagtccgttaactcccggcattgatgccgagtgtaactattttgaaaagcagagaaagccacctgccacttcaatacaccgcgtttaatagttgtcaagccaccgagaactaatttcccttcccggaattgtaatccttttaggcagcatgaagagaaaagcacagagtccaacatatgccagtaaattaggcacacgctggcaatgcccacgatattccgtgtacacacgtacacataccgaggtgaaacaaagtggaaggtcaagcgaacttccttttacgtcgtagcttggattcattctcgccccttggcggaatcttagaataataaataaaacgagccataatatcttcaatataatatagcaagttgagatcaggtggtctcagtatttctgcagaaccctggtcgaagccttccaggtccacaatcgaagcgggagaagctcttgcgaaggggtggagaaggaggggcagggatgttgggtccggaatacagattatctccggcaaatatacgtatgttgtatggagtagtactccgtacattttacaatcgtatgtttgtactttatagtttgcctagagtttatctaaaaagtaatatcagagtatatcctgaggtccaatttcggattcaatactccgtatgataaaccacgtagtcacacgggactcgaatggcgcgcaggatctgaaactttaggccatgttactcggtcgagatctcggcttaataatagaatattaaaaggagtccgcattgcaaaagtacgcgaactgcagcctatgtcagagcacggaagtagtcacgtccaataaggggaaccccctgaatgccaattttgtctagagcattcctgtgtggctgaacttaggagaaacactctacggagtactccgtacggaatactactctatttccctacggagtacatatattgagcacctagatagcaatagtattagtgtcctagtgagacaattagacttattccattgctagtccaatacgcttaattttcttttatggcatagttcgctccatgtttcactccaaatcaacccacgaagctaagtgcggaaaccactgcggaacagaaagcggctacggcgcatccactaaagtactcctgatgtagggcaacactgcatggccgttacagaagccttcggtcggacaatcccagtcttccccaaaaagaggcctgtgaactcatgccccgcttctgaagacactgccatgtacatctggcctgcatgcaggagccaaatgcagcctacagggtgagggagttaacgatgtatggcgagtcttctgccgagctcaatggagctcatcttccctcgggccccggatgacgtgcttgaagagatcagtgcagagtggaagtcttacgttggctgaaatgttatctatcgtgcagtattgtatctatactacacaacatagtaattcagatatgtatacggagtatttagaacagtccatagttagaagaatacataactatagtagatgtcacttgcggggctgtcagccactgcggagccaaaaacaaagaagagccagggtcagccataatccacactcggggagatggctccatctccaaatataagatctactccaacatcatatatacaacggcatacctacgtgtgtacataattgattgtttgaatggtcacttgtgcccaataaatagtctggtaatcgccgcgatcggaggcacccaaggattgggccctgattgcagtacaacatatacaacgtatgtggcagtgagccttatgtggtacgttcataatctattcacggtgaataatcagattacatatgatataactatatggaagacatcatatattgttcgacgactccgtatggtttcggggctttattatcatccgtccacgggagcctaggtgggatataccttgcaagtgcgtcatcatgtccggacgcgtaggaagatcaggaattgagatttgacgatgtgtctactttgtgtctatgtctctgaaacttagggtctccttttcttgttttttttttttttttttttttggttattctttatatttctttgtaaatctaaaatctaagtcgaattaatctttaatagacctataaatccaataaatcccaacaatcctaatacgtctatactaccgctatcggccatagttcggaagacatcgtatgtaatttttttggtaattttgaactgaaaatactgtaattacctgtctttttttttcatctctttttttttctcctctcgcctcttgcctccccgaggaacgatcgtctttttccgtcttttctcgtcttttctatcttttttttttttttttattcgacccggtcttccttagaattttccttttcgtctttaccaagaaacttatcccccattttcttcttctcctcctccccaatttccccaaattctcaattcgcaatcctcaattcactgcacttcaatcttcttcgtttcattctttgaaatatttcctttctattggctatttctgagtcaattcctcgatctcattatcttgacgcgaagcagatctcggactagttgtttttttgctgcgagagacccacttgcacgcccgcttcttcggtggatacagaaccatcgacggtgacaacgtgcggataaatcaccatcccatttttccttctggtgggtgaccgtggggaatcttcttcaattaagcatctctttcttcctctctctcgcattcgtgtggagtcaactcgtgtgaacccgtgaatcccgtgagaccctgtgaccgtttgcctctctgttcgcaggaaaattttcaaacaaggagcttcctttgcttcgaagaaaaaaaaatcatccagagtgcgggtttgatgattgacttaccgtgaacatctttctttctttcctacacgatctctcctctgtccacaatggatcccagatctcacccttcccgtcctccatccaccagtctgcctccaggctccacgcccatgtcttcgactcccatctcgagcatgcacatgccacaatactcgatgcagccgcagtatccggtttcgcagccgcatactctgcctccattgcagcctcatcaccctcagtcgcccgcgcctcaccactacatgggccagccgtaccgtccggatttgtcgcggtaccctccgtcaactcacgatgtctacggggcttcccaggcccctatgatgccgcacacgactgtcggtagccttccgccatcgtctctgttgaatctacctaaccctcaaacacaggcgcatcagcagtaccccccacctccgagtgtccttccgcccgcatcctccgctcagagttaccctcagccgattgctccggcacccccgcgcgaccgtcgcccggatttcaatggtcttccttccggtgcctttagttactccgatggtaagggttggggtatgactcctgatgtgaacggcgcgaacggctccccttacgccaaggaaccaccacggacgcaggttgtcggctctcagggccgccgtggcattttgcccagtgtcccaggccgcgcgactccggtttctaacggggtcaatggtacagctaagagcaccactatccctgctaaggacgcggacggcaaattcccctgcccgcactgtaacaagacttacctccacgccaagcacctcaagcgccatctgttgagacgtgagttttcgaagccagctcgaaggaaaaagtttgaaattccaagttgattgagatttgctaaccgacgtattttttttctctgatttgtacagacactggtgatcgcccctacatgtgtgttctttgcaaggacactttctcccgcagtgatatcttgaagcgtcacttccaaaagtgctcaatccgccggggtaatccgaccggtgcgactcacttgtcccacccccaggcccatctgaagcggtctcaacagcaagcagctgcggctgccgcggccaatccccccaagccgctccaggatgaagtcagtaatcccgtcccccactccaatggcgttatgggtacgcaattcgatggggccgtgaatggcaatggaatggctacaggccgtcctggctacacggagcagcagccgctaggcttcacgatgcagtctgtcaacggcatgaaccgtggtcccggtgacgacgcgttctccgctggccaggcgcacgcgagagcctcgtggatggctggacccaagcagaatccgtatctcatgcagcctggtgtcgatgcccatggccagcagctgacggttgatcgtccccttgaacaggtaaagcccccggtctaccatgaccaaaaaccggtcatgcccggtccccattcacatcacccgggtgttgactggaattcgatgtttcagcacggttcttccgacggttacattaaccccgttttcccccactccatggccgcgggccaggagccgatccacgcccccgtcgaccacgaccgcaagttctaccccgcctcgaccggtcctgagagcggtatgaacggactgtaccttgcttcgactacgctgagcggagacggttagttcttgccctttttttttcctaccccgcccattatagcatgggattgttctaacaataatatgcaggtactgtgcagcccgcgagacagtagacggtgaattcgatcggaaagcaagatgatgactatgaggcatgagattgaaaaagcgtctcgacgaagcaagagaccacaggtttctttttttcttcacgctgtgggtaggactattgctctccaccctctcttctattgtttctaggccttcgttcctagcttctctgctggtgcaaatccactggtcacgatgtctcagcaaatccgtctacgatagtcctttgatccgttcgctcccggctttcagcttgacggcgttacgtgctcctagcgtcccccgtttccggttttgttttagtatcgtttgtcgatctatctctttttcttataatcccatctggtgtggggtgtgcattcttactcaagtggtttgcgagtctggttacattttatcttgaacccccgacgtgaggggcagatggtatggtgggtggtttgttcggcgtccacaacatagacatgggcatgtgttcatcttttgcgcgagtgttcgacatcagaaagaagaaaagctttttttttatatattatctttcatgggatggatgttgtcgaattgccacgtttctttcattgcagtccatttttcttttaccatgtgcttctatctttccctttcttttctgcatcgcatggcctcttttctcgtgtaaagtcggcatggcaggacatatgtgtgctttgggaatgaggtgtgaattaaggtgtttttgtgttaggatttactagaaaagcagctagaaatagacttatggatccattttgactggggaatctggggtatggaagaacatcacaaggtacttctcatttatatgtaagaggtatatttagtattatttaatgtacaacatagagtagcggagaaatggagaaatggagaaaatggagaaaatataaaagactccgaaaacttcctacgtaacgtcatggccataatccaacgcccgtgattggagcgcctatagggatcgggatctcttaacgggatctctcaaacttctcttctactgattctactgaaactcctattctatagtcaaatcatctatacaggcgaatctgtcccaacatgtctaacaaccgtccattcctcgccaacttcctggccgctttccgcgcccagtcaacctacaaacctacccagcaagtcggcaacactacctcaaccctctcttcggcccaaatctcccagagcgcccgcaccatcgcaacaaaagcagcaaactccgctcaaggctcctcagtaccatcatctgcttccgccacagctcaccacaatcacaaccacaaccacaaccacaaccaccacaaccaccacacccacacgtcctcttcttcttcctcagcaactacaacaccagccggtccagtccaaggcccaagtccagccccttcacatcactaccaccacgaccagacatccctcccctctacaccaccgtcatcaacacctatcccgatcaaccgtgacactccagaccgccagcgtcgcgggagtgactcttccagcggctcgggcgggttccgcgatgccatcggtccggagaagtggtatattggtgggagaacaccggctggcgaagagcgcttttatcgcctcgggatggttacgaagggtggggggcggcttggcgggagcgggcgggtggggagtattgatcagttgagtctttgaggtataagatgtggggggaatggggtctcgggtgttttatggggttttgtgttcgacctggtctcggttctgttctgggttgattctggctctggctcggacactgactcagatgtccatggctatcaccccgggacttcagctggatgttcaatcagatggatttctgaccctgatcagttacgaagtttatgtgtgtttcttcttcttcttcttcttcttcttcttcttctttttttgccttttcccacctgcgttctatcggtctgctatgtggcgcggcattactgggcgtcctgggatggtgttctctttcctttacctcttttcgtttcttcccaaggtcctctgatacctgtctagatctgtaatctggattccggatggtagcagattccaactggggaccttggtttcttgctggtgattttgctggtacaaaagaagcccaaaaaagacatacatcttacactatttacatgagttacgatccgcgtgggagtgggggcttatttggtctctcgttctgacttctctcctctgcctctttttgttctatcttcgacacttgcaggttgatggtcaaaaacatgactatccaatagtcaataacacatgttcgaatattcttgcttggctcgaccgtttcctataggctacatgcatatgcacaaaaataaggtattgatccctgtcaagtaaaagatgagattctgtatgtctacctgggcagctagctagtcccctcacaccacctgctgtgtaacgcaatgcagcacacccccagtcctgggcaaggcattcacctcaacctgacggacctccctgtctggaaccaggctcttgaacaactcaaaggctttcgcatcagcctcagcatcgccaaacgccggcataaccagccccccgttaacgaaatagaagttaacatacgaagccgctggcgcatcctcctccccatggagatcccccttaacgcaggccggatccggctcaacaacatcatgaatctcaaatcgccgtccccgggcatcagtagacctttccaagacctcccgaatctccgagtagatctcccaatgcaccttatccgccttctcatggggacgacaaacaacaacaacaccgggcctgacaaacctcacctcagcatcaatatgcacatcggtaacatcaagcccaacccgaccagggaaccagataaaagtactaacacccagcaacctgccaagctcagcctcgatctccgccttcccgagtcccgcattccgcgcatccccaataatactactctccgtcgccataaacgtcccctctccatcaacttcaatccccccgccctcgagcctgatatccgtctgcacgcgcacaacaacatccgccacagcctccgtcttctcattctcgagatccagcacgacacccgcaaaagccgtgttctcgcgcatggcttcctcgtccattaccggccactccacgtactgtggggacttttccagggctttggctgctgcgggcgagacgccggcgccgtagatgcgttctgttgttttgtggccccattcacagaagcggaagtcgattgcgtagcgggttttgtctgctgcgtccgcgctgcggatgtagacggggcctgtgtcgcggatccagcagtggtttgttggcgcggaaatgagggttatgttcgcgcgctgctggggtgatagggtggtctgtttgtcgaggaggccttgggctgatgggatgtcttctggtcgggcgtggagacggacgggctcgaaggctgcgattgctgtcgcgagggatattatctcattgcgggttgcggcgttgagttctgggagggttgagcggcatgaggggaagcttagtagggttgcgcggtgggggcttgtttctgctgggcagatgaattgctttgttttgtctggttggtgcgcgagggcgtggtgctggatgtgccatgttttattggtgggtggcatggttgttgggtaggtttgttggaacaggggattggattggtagacggctgggatctgagttcgagctatggagatctggatgggttagattgcatgtgtcgtataggatgtggtggggtggatagactgatatactgacagtgacagatgcttgtcttagacgttggatagaccgaagaagcatgagaataccccgggtgacttggagggtatttatgttgaagggaatatcccgatgtggtcaatatgaggagatgaggagatgaggagacggatgtcaaatatgagcctaaacaagttaaaaggacgagaaccattgaactgccgcattgggatagttcaagcgataagcttaacatcatagtggggctcttgagttggagctaacccttttcgaacgggtggcttcagagaaattgcaatttatcgactgttcctggatctaagtaacactgtatagattcatagtctgatttccccggggatctgttctataagctttgtatagaatcaaattcctcacctacatactcatctctcagcttctatctaaagaatatcttgataagaggtaccaacgataccagtcagtgatgtagttccctatgtccatctattgaatatataatggaaggtgaaatacaagacatgccaaacgtttttcaggtatacaagtatatcacatataacagcgtcttaaaagctgccaatataggaaatccaggtgcaacgtatagttctgaagctacctacatgatgtatgatgtagggcagtaggcagacctgatacttcctttaaaaaaaagtgctgcctaactgcgtaacccttattcaactcattaaagccctttcctcctcattttctcccaaccacaacatcggaagtgcagtgagcgctaccagtacccccaaagtgcccgtcatcgcgccccacccaaaacgatattcgacaaacccaccccacagcggtccaaagaacactcccgcaaattgacacatgctctgcagtccgaatccctgcgccacggcacccttgggtccgagtattcccgggtctctgagttccatcgccgtgagcgcgcgctgcgtttcaacgtacatagctggcgcacaggcatggatgaaaattccgacaaggaagagcaatgatactaacagagctatctgttcgttcgacttggtctggacgaaccgcagacagatgaggctgggcgagagggaaacgaaacacccgaaggctacgaagcgggcaccgaacctatcggtgaaactgccgaacagcggctcgaaaaaggccggtacggccattgggagaaagatcagtcccatgccgagggcgttccagccgaatgtcgtttcgacgaagatggggagggtcttagtgtgattagcgagttcttcatgccaaaaacatcgagcctgatacataccgcatcaaaagcagaaagcaaaagtccctgggtaagaagcgcccatgaagatatcaacactcggcgctgcttgagcatccggaagataacgaaccccttccttctctggatgacctgtggttcgcgcggaccgacagagggaatacgctgcgtcgtctccagatccgactccaggtctccattagattctccagcccattgaacagcgaccttcttctcgatcaaaaccaaccgcatgaccatatcaagtgcaagaataggatatgcaaaccagaacacggcgttgtatccaccagaattgtacacaacgcctccgaggaacggacccagcaggaagccagaggcgatcgcggaaccaagataccctattgtctgaccgagacgctcccggggcacagcatcgccgatgagagcgaatgccgctaccactactaaagcgcctgcgatgccttggagtagacgagccgcgacaaatgcagcgatggaacgcgccagctgcaatatcagcatgcagccggttaacatgactagggcactgatgaagggtagtcgacgtgtgcgtccgcggtcgaccaggtagccgaatatgggacacatcaatagagacgtgcctgcttcagacatgagaaggacactgacccagtattctcctgtttgaaggtgagtatgagtatgggataattgtgagggaaatctgttaggaggacaggaacagaacatacggtgctcaaattcgattccggctcggtatacgagggctgttggcatcacggggactatctgccattcgttgattctgcgtccaattcacgatatagaagagggcatttgcttaccatggcatataggaggaattccttattccaattgagtcttgtcagttgcggactcgtaagactaggcgtttagccgctcacataccgtgaaggtggacatccagactgcaccgacgatgaaaaccgttgaggaacgaaacttcaacagccagggagtacgtttaccccctggctctctcttgagatttgatatatcgcctatagccatacttatcgagatcgacgagcggttgtctgcggatggaaacaaagaagttcctcgctaatccgaatcagtaagaaaaagttccgactaatatgaggtccgactaattggaaatgcagtcaaagctgagaaaaaacgaaactagtcgaatgccagacataataggtaaacgacgactctttgttgaacaaaggagaacccagaaagctgtcagcccagctttggccgagaatcggacagacctcgcccgctttttactcatcgaacgtcacccaatcgcgggatattatgttgattggtagggcttggaagagtgcactgcatgcaagattcgtcagatcgacgttgcagacgataccaccactgcccagattctgcgcattggcaccaaccacaccctccgattcgacgattgcaatctaagccggagatcaggcgtgcttggcattagtttcaatgatgcacttcctgaattatttatttggccaaggaagagtcgcatctgctatctggatctgacatacatcttacatacagtcgatgtggtgcatgggtcttggagattgttccaactggaatttgaatggttatttagcgttaggtatgtatgagagatgagagactctgccacatagctgaatatcttggttattccctgcttaaagatggaactttgctttggtcgccggaggagcgtggtcggcagcgtggctaagcggaatggtctcgggtaatattgtcacccaggtagaggcgagtcaactccaccacgacaaccgttgttgaccactagattggtcagtgtgtaggatgtttgcatatgctgtgacaggatgggcaggccacgcattttccctatgcggcaggcaagtactctcctgtgctctgttggtattgaggctctttcactaccgagtctcggcgaaatcaccagcggtaattccttttgataaacagaaataagtgtcctgacggtattcgtgttccttggtgttgattgtttggggatatgctgcgtttcgtaggcctcatatacccgatttgcatgagcaacctgtatacaccacggaggatatagatacaatctaccgtggacgatcgaagtaggacagccttcacctgatatacctttggtgtatactccgtggaaagtacacgaatgaacaagggagaacttcaaaacatgatatctcgtcatcaaggagagtcaacgtacagaccgtgacgtctttcccccccgcactgtactaccagcggcgaggtcactgcgcatgtgtctgttgtagcagttgtcagcagagagcatatcatgtcagcgctaagtgtctaccgccaggagttccaggtctttcacggctcgcacctcgccgggagtccgcagtggagatctccgcgatggtcatcgtagcacaaagcgtaagggatttggatataataatttaggggtttgcagttgatgtttgcagagtcggaggtcgggatttcgggattcgaggaatgtgagatctccactgtattgcactcggctagtgacccgaaaatctgggggaaaggaacttttgtttccttctctctacccctgtatgattgtgataggtggttggggatgccaatggtatgggaacatcaggccatagagaggagagtcgtctaatcgcaactgataagatcgggatttgggggggcggccactcgcggtcatcgcggccatcggaggtgcccgaagctctcttgatcagccaattcggtgcattccaaggttcagataaataaatactcatcagatcccagatctgctggataatacaatctttttacctttcagtatcattcagtatcctctactacccttctcttctatattccaaggttattcctcacaattcaagatgagcgcattggcagctgcccgctacggcaaagacaatgtccgcgtgtgcaaggtgcaccgcgatgagaagactggtatccagactgtcgtggagatgaccgtgtgtgtcctgttggagggcgatattgagacctcgtaagtcgagcgacatctctcatctccaaaaaggttggagctaacccaagctccccacagttacaccaaagccgacaacagcgtcgttgtcgcaaccgactcgattaagaataccgtcttcatcacagccaagcagaaccccgtaacaccaccggagctgttcggctcaatcctgggcacacacttcatcgagaagtacagccacatccacgcggcgcatgtcaatatcgtgacccaccgctgggtgcgcatggacatcgatggcaagccgcacccgcactcgttcatcaagcctggcaccgagacgcgcgacgtgcaagttgacgttatcgagggcaagggcatcgacatcaactccgccatcaacggactgaccgtgctgaagagcaccggttcccagttctggggcttcgttcgcgacgagtacaccactctcaaggagacctgggaccgtattctcagcaccgatgtcgcggcgaactggcagtggcgccgcttcactggtctcgccgaggtcaaggcgcactttgagaagttcaatgctgcttgggaggcggcccgcgctattaccctcaagacctttgctgaggataacagtgcctccgtccaggcgacgatgtataagatgggagagcagattcttgctgctgcgcctctgctggatactgtttcgtatgcgttgcctaataaccacttcttcgaaatcggtatgtttaactcttccccttgtgaatcttggatttgggctaatctttgcgcttctagatctcagctggcacaagggcctcaagaacaccggcaaggacgccgaggtgtacgctccccaatccaaccccaacggtcttatcaagtgcaccgttgcccggtctggccaaaaggctaagctgtaaatgctttctagaggattgtcggcgagctccgacatgggcgctagctggtttcctccccttctcttgtacatataaccatacatttgctatacctccgggatcagactccctatatctcgaattcaatccagcacttcttcccagaatacagcaacgtagaaaagcattgtatagtacgtggtattgtgatagtatgtgctataagtacatttcaaaagaaccgcaggctcgaaggctgaaaagtctgaggccaagtaacggagtagataatcaaaagcaatatcccaaatggactccacacccatgcgcttttgcggttggatcataacatcgcaggagaatagaatacaggcagacacggacccggtttaggtcggcgttgtaaaatgacgaaaggagataaaaatgatgctttatgcgcttggcttgtcggcggcgtttttgaatgcttcctgcacctcaggcagatttccgatcactgattggttgccgaacttgacaatgttctccttgtaggggtgggcggcgccttcgaaagctgcaagatatttggttagactgggttcaaaagataaagaaagtagatgggctaaatgaatgggtccatgtcgttctttgaagatgaacctgtccgcaggtgtatatcccatccagtaatccagtaacccatccaaacagcggggacgcagcaaccacgagcacttactcttcaatcgagctaggcggatatccttgagtcggtttttaggcaacatgcccctgacagcacggcgcaagacttcaccaccaccccatttggcaaacatctgatccatcgtcatgctcttcaagctaccgggccgcgtcgtgtgcgtgtagtacttcttctggaatcgcttctttcccgttgtcttgagatcgtgacatcccacaaccaccacatagtcaccacagtctgttgaagggtcgtagatgggcttgttcttgcccatcaaaacgagggcgatcgacgaggcgagacggccgagggatcgttcatcggcgccggcgtcgacatagtgccatgtgcgcgagtaggcgagacgggtctgatgggttgatggttagaactgagcggattatttggatgcagcgtatgcgcggttcgcccggaaggatccgcattgaagctatttaccttgccgacgacttgcgacatcttgttgacgcggcggagggtaatataggtgccggggtgagggggaattagccaattaacaaaaggcagggaagtccaattgaagattccagcaagaaaaacagatccagcgcctaaatgtccgagataatgatgatctcaatgttctctgtattgcttgtactctaacctgcccccgattgaagttctccgggtcatgtgaccaagccctaagtctcgtgccacgctagtcccaatgtagaattagcgtcgcacactaagcgaaacccgcacggaagggcaaatcactgtgtatgggaattcaagtgactctttttccatctccctcgacaacacactccctcccccacgacaaccaccatggcttccgtcccgagtgtgcaatgcttcggcaagaagaagacgggtaagctctctttttttccgaccggagatcagcgtgaattgaacctgtgcgctgacatatttaattttcaatagccaccgctgtcgcccactgcaaggtatgatccacgcctctaccccctcggtcccaatacgttgtttcgagatatctggaagggaaacggtcggaaaggaattgtgcttggaatgaaggactgggatcgaattttggaaggatatacgaaacaacatgttgcgcgatcgtggaggtcatatacacattgaactggacaacttgctgagacatttcacagcaaggcaagggcctcgtcaaggttaacggccagcccctctccctggtccagcccgagatcctccgcttcaaggtacgcacaatacgttcgctccaacaactcccgcgcgccagaaaagaaggggattcgcacgaatcgcaagcgacaatggcaatgggaaaaagcctctccgaaatcgatttctgacaatccacgctcgaatttttaggtctacgagcccctcctgatcgtcggcgctgacaagttcgccggtgtcgacatccgtgtccgtgttaccggtggtggtcacacttcccaggtctacgccatccgtcaggccatcgccaagtccattgtcgcctactaccagaagtacgtcgatgagcactccaagaaccagctgaagcaggctcttgctcagtacgaccgcacactcctggttgccgacaaccgccgtgccgagcccaagaagttcggtggtcgcggtgcccgctcccgctaccagaagtcctaccgttaaatttttctttctcacttgttacgcggcgaaagggaaaagaaaagtttacggcaacagggaaatggaatatgtctgtcttcatatgttttttctatcacgacttatttccatgacttcttggtggactggggacttgggagaattcggggatgtttgagcggtttatgttcggtttaaccgctcttacatgagatcagaggaccgggctagaggaatttgggaaaatgacctctggttgttgttccggtgccttgttgatatgtttttcactggcgctgtcctgcacggctggaaaaaatacctagcatagccaggaaaatctactcaaatgatactgggttttatcttgttcaagtctttgtttttggcatctttggggttattttagctatggtgttctaacattggtctcactttttcccagagttatgttctccatacgccgaacttgggctggtatatgctctcgaaggtaaaccaagtcctcgcccctctcccatactggaccacatctaggatacatcgatctacatacgtagttatagcaagtttaccccggaattggctatctatcacttgaatttactgccaagcctcaatccaattggtcagtttcttgtcatttctagatgatgttagccacatggacccttgcatcacttgcagcaaatgtcgcggccctgtttcgacatatccaacaccgatctcgtctcaaaacagcccagaactagtcgtcagtcagacattgccttgtatcaccactgatacccttgggcagtgggcttaccatttcacctgaaatgcacaatgctcaccaaagtaggcgaattgcaatgtcttgtctcggccaaccctcgcttcgtctcacatcggaaattcttttccttcctccttgggcgtagtattggatgggatagtatggtatcagagtaatgtgggttgaaccatggtctgtaaatgtgctcccagtgctatgaaattcaactgtcagcaaagtagaaacagactgccgactcgtttgtctgatcaaccctctgtggttgagaccttgtaatcaactcctatcagaggcctgattttttctttcactgacaactgtgcaaatgcgtagtcgcttggataggaataagaacgtttaagtcatcatttgggagtttcaaggctcaaccacttggggatattctcattcagaatggcatgaggctgaaccataccaaagtatacgggagttgccaacgtacctttctcaatcagccccatactgtcgggattttgtattcatctcgtgtcggattcgttttctctcgatgcttatgccaatgcgtaggcactccattgaataattcaacagtcaacaggtgtggtttcgaggctcgccaacttggtatgcagcccaaaattagcaaccactaaaatgcaggggaatggaaaacttgcgtttattcatctcaccattgaatcacaggcgtgctctcgtgagagatatgaagcagtgctgcggccaaacatagggaaatcgtaggcatgtttcgattgaccaatcctctgtagtggaaaccttgcgtatctcgtatcagatgttatatttttattccattggagcccatgccaatgcgtagccatccaggaaattgaaagtgaagcagtcatcatttaggagatttgaaggtttatccacttgggaaggttctcctaaaactgaagattaacattcataaagagtagtagaatgggaaacttgcctttcttgcccaggtgatttgtctcagctattactagggtataggtgaggccgtatccaagtgtgagtctagggagatttttctagaagtccatggtcaatgttcagtaggtcaagggaatgggaaacttgcctttcttgatttgcctcagctattactataggtgaggtcgtatccaagtgtgagtctagggagatttttctagaagtccatggtcaatgttcagtaggtcaagggaatgggaaacttgcctttcttgatttgcctcagccattactagggtataggtgaggtcgtatccaagtgtgagtctcgggagatttttctagaagtccatagtcaatgttcagtaggtcaagggaataggaaacttgcctttcttgatttgcctcagccattactagggtataggtgaggccgtatccaagtgtgagtctcgggagatttttctagaagtccatggtcaatgttcagtaggttaagggaatgggaaacttgcctctctccttctatctcaatccgtcttcaatcatacgcttgttttgacctaaaatgttatcatgaagcataggggatcgcaaacatacctcttgatattcgtgatccgccgagttctcgcgtcaggtacactttctctattcgttgtcttgggcaccgaatagagaaggcataaggaatcatcattcgcgagattcggggcttgtctctcaatgtgcctatagtcactgcacgagtatgtcgactcgcggaagcgagaagtgggaatcgtacctaggcaattgaaagtcagcgacagagattcaattcaaccacatcggtcttggagtcaattggaaaacaaatccttttaactttgcattaacctgaatattgaattcaggaccggggaaccagcaaacgagaagcaaaagtgttgcaatggtctggatcagcactcttgatcgggggtaagcagcctcgcatcagactgttcttatcatctgctgtcctcaaagtccacagtgagagtgcgggctgggatgtagctcttgtagtagaatgctgtcatcatcttgcgggcttgattgttctcgggcgatgaaggactgtgtcatctcatatctaaatagaaaattagcaactttgaaatctagcctgatgtattagaacgattagaagagcggccagtattgtagcggtctggatcaaattagtgtatatagcctcgcatcagattgttcttttcatttgttgtcctcaaagtccacagtgaagagtgtagactaaggcgctcttgtagaatgttgtcatcattttgcgggctttggttgttctcgggcgataaagggccgtgtcaagtcatacctgaacgggaaattggcaatctaaagcgatgcattggaacgattagcagaaatccccatgtcaacgcgggaagaattgcctcgtaccttgagaatatcggtaattttgtctttggtctcatatcagccagagagctgcatatcaacaccgggagttgggatcgaaaagtaaatgagagttccaagggcttggtccgaatcaaccgtttgatttgtcgcagctcagactgactgacgtagatctctgggtcattgaaagttgcgaatgttcaagttctggtttgcaagcttttgaatttcctaggtattagcatcaagtcatacctactcatgatgggaacgaaatactttgtcttggaagcgtgaacccaaagacataatgtggaattggatcacaacaacggacgagtcagtctgcagatcaagtaaccttgttcctccaattagcatcggtgttcaattccattctcaccttcgagttgtagtcctcgtaatctgagcattcagatgattggagccgtggtaattgagggtaaaatggaattatctagatatcgcgaatgttagcaaaataaagccgacgtaacaagagctgcataatcagccaagggaatggggtaattttttgtcgccttgtatcagatgtgctaggaatctatcactgagtccattggttccgatgctccatagtcactcaaagtgtagtatgttgttctttctcatcataaaccgtgatttctgcggcaccgaatatcaattgtgcttgtgggttggaaggggaatcgtaccttgccgtacaatatggaaacctagaatatctcatggttataagcgtggacttctagtatcaaggcagaacaactgtcacggaataagccaaggaaaggaatatccttcatttcgcatcgtatcagagttcctttcggttctttctttggtcgagtgaccgacataacatgggctttcgggtccaccgagtatccattgtgcttgtaatgcgaggggattcatcgagttggtgaacatgatatgcttatctggggatcttgggagtgtcagcaatacttgtcgaacattattccatagtacgaacagtttgatcaacaaagatacatttctgcattgacgcggtcagcttagttcttttcacttccgtcaagagtttgttcttagcccatcggcctctgtagctcgaatagccatttgcgaggctcgagtcccaaatgccatttggatttgcaggctgcaggctgtcgaagcgatcgtattgtcatatgtgcgcgtgtcgacggcatggatactattcatatctatttcccaaacgttagccaatcggtccaataatacaatatatagtgacgatcgccgtctcatcaataggagaaataagtgcttcaactcacatcagatcaactgtaacgatgatgttaagaaaactgtcgtatcatcatccgatggatttgagtcgagaagtcaaactcgaattaaggctcgagtcataccaaatcgtagagacatggtatcctaggtagattagcgaaaatgggaacgactgttctattgatcgttgggtgtaggacaggtgaggacttcgttcatctcgctgtaggatattcgacggcgagacatcaaaaaagaaagatgggacttactgtacgatatattacctgaaaaatccaggaccaagtgtgtagaagattgtcaaagagacataaatcaatgtaggcagcgaagtataaacgacgcagctctggaatcgccgtagcgacgcacgtcaacaagacataaaaaccgtacgcaacgaagtatacgacgcagctctggaatcgccgtagcgacgcacgtcaacgagaaataaaaaccgtacgcaacgaagtatacgacacagttttgggctcggcttccacgtggcttgtcagatctttctttgcccctttaagatcctttctctcgttcagacctttgttcattgtcttagatctatttagagtgctgtactgcaggagatatgttattgttagcctcattatcattatattccgttccgttgatctaaacaagtagacacatgcatcatataagctaggggggtccatacaagtagacgggcttctcattctcacataatggtctaaattttaaattctagagttattgggctaggctctgtacaagcaaataatgcttttttggccgttcttaaacacttagacagctagttgcctcaatccgagccatttatggtgcccgttatattgataagacccatatatgttggtacttctgaagtactatgcctgaaagaaaaataaattcgctgtttatattagagtgtatcttgcaagaatcgtggactagttatgtacatatgtagttatagagttagatacgtgcaattattagggcacgatatgatcgcctgatctccgggtatacgggtatacgtattcccgatgtcgcctagataatggcgggcggggctgctacagagctgactaatcacaatttttatctctcagcctgaggcagaaacacttacgacgctgacataatctcaccagcgcggaacaggccaacgcgacccgacgcgtgatgttcgcgtgcctggatgagttgtgtgacactccttttatcctccctttccccgcaacaaccgtcaatccgatctactcttctttacgcagtccaacactatttaatgggcagtagtctttgaacaaacggcaatgcctacagctcgtgaaagattggccgagctgagggccctccgtgcctcaggaaagaaacgaatttccacatacgaggtcgaggaccagggcgacatctacgacgaggttgatgatgacggttacaagaaggttatccggaaccgtcttgatcaggatgatttcgtcgtcgatgataacggtgccggttacgcggacgatggccgcgaagtatggaacgaacagacagccgaatacgacagcgacgaaagcgacgaactacctacacgaggcaaggctgccaaacgaaagagggaagaggaacaacagcgaaaggagaaaatgaacaatggcatatccaaatacttcaataaaggacaggctgcggcttctgctcctaagcgtaaggtgagtcctttctgctcttgggatccaaatccctaattttaacaatccgttttataagcccgttgctactgccgaggatgatgcattcatggccgatctccttggagaggtcgatgccaacgtcgtatcgagccacgccccgacacgcaacattgtcaagtcagaagcccgacgcaaagttcgcgttctttctccgcccttgtctgagaagcgccgccacgagaaaattcacgcaaaggacgaaaatgacatgccaagctcgccaatgaaggaccagacattacactctgacgatctcgatgacggtcctctaccgatgccagacgatgacgatgtccccatgagtgatatcttgccctcatccccaattagcaaagcagtggagcggaggaacactgtaccggtcaaggctgaagagccagaagacgacgatgttgacctcatggacgtcgcagaagtcactggagactctagccttaaaacgaaaacaattaatatgaccggcagtcggccgcccccgaagatcaagtatgaagttgcttctacaccagaaggctcgtccccagtcaaatcaatgccagaagtaatggatgcttcttggaatgacgtgaggagcaaattgaacgttctcagcagtccagccccggaaatgcgatcattcggcaagcttcgtgcccaagatgttgtcgaagacgacggcagtctgcgcatattctggctggactacacggaagtcaacggcagcctgtgtctgttcggaaaagtgaagaacaagcagaatggatcctatactagtgcattcgtcaaggttgacaatatcttgcgaaagctttatttccttccgcgcgaatatcgatacaagcacggacgagcgactgaagaggaggttggcatgcaagatgtttactcagaggtcgacgagatgatgtcgaaacttaaggtgggtatgcacaagatgaaaccgtgcgaacgaaagtatgcatttgaaatgcccggggtcccaaaggaggcagaatatctcaaattactctacccctacgacaaggctgcactgccaatggaaactaagggagagaccttttcgaacgttttcggtaccaatacctccctatttgaacagtttgtgctctggaaaaatataatgggcccttgctggctcaagatcgaccaggccgactttgccgcagtaaccaacgcatcctggtgcaagttcgaatgccaggccaccaaaccagcactcatcagcctcgtcccagattcggaaaacctggacgccccgcccttgaccttaatgagcctttctttccgtacccagctcaatgtcaaggagaacaagcaggagattctagtagcgagtgcccgagtgtatgaagatgtttctctaactgataccactccccctgagaagcttccgtgcaagacattcaccgtcatgcgccctgctggtgggtcgtacccaatgcatttcgaagccgaagcacgaaaacagcggggaactgtcattctcgaaagaagcgagcagttcttgctcagcaggttcctggctatgttcgagaagatggaccccgatgtcatcatgggccaccagttgcaggatgtcgacctgggcattctactcagccggatgcgtgaaaagaagactcctggatggcaccgtattggccgactcaggcgtggagattggcctaagaatttcaacaagggcggcaacttctttgcggaaaggcagttgattgctggaagattgatgtgtgatgttgctaacgacatgggcaaggtaatgctctcttcaaagtgagtatatgacaatgctgacagccactagtctcttatgatgaaatgccagtcgtggagtttgactgagatgtgccaactctacctcggccaaggcaatgtacgccaggaaatagatgtcgaagcggcattgaagacctgggcgaccaccaaagaaggtctcatgaacttcgtcaatcattgtgatacagatacatacttcgttgcagcattggttctacgccttcagatgctgccgctcacaaaggtcctgaccaataccgctggtaattcgtgggcacgcacactgagtggtacgcgtgccgagcgaaacgagtatattctgctacatgagttccatcgcaacaaatacatctgtcctgacaagtactcgtctcgtcttcagaaggcagaagagaaaatgcaagatggcgacgacgacgaagccctcgacaagaaaaagaaggacaagttcaagggtggtcttgttttcgagcccgaaaaaggtctttacgaccgcttcgttcttgttatggacttcaacagtctgtaccccagtatcatccaggaatacaacatctgcttcacaactgtggatcgaacagctacggtaaattgactcaaagcaagccccggtctcatttcatttgttctaacatgtgcaactaggctgagaatgagaacgaagagaaagtgccagatgtcccctcctctgagcaagaacaaggtgttctccctcggctgatcgcgaccttggttaatcgtcgacgcgaagtgaagaagttgatgaaagacaagcgtgccacgcccgaacaactggccatatgggatacaaaacaattggccttgaagttgactgccaattccatgtacggatgcttgggatacacacagagtcgattctacgctcgacctctggcaatgctcaccaccttcaagggacgtgagattctgaggaataccaaggaattagccgaaagccagcaattgcgagtcatttatggtgataccgattcggtcatgatcaacacgaatatggacaacatgagcgatgccatcaaggttggcgaagagttcaagaaatcggtcaacgaacgctaccgacttctagaaatcgatattgataatatcttccgtcgacttctactacacgccaagaagaagtacgctgccgtcaaccttaccgaggtggatggcaagtacgtcgagaaactggaggttaagggtcttgacatgaagcgtcgtgaatactgctccctctcaaaggaggtatcatcgaaattgctcaacgaaatcctgtccggtgaagatcaggaagtcgtgctcaacaagattcacgaatacttgcgcgagcttgcaggcaggatgaaggaatacacaatcccggtgcagaaatacgtgatctacactgtacgtgatgaacgccaggaatattggtcattctgctaatgttttaccagaaactttcaaaacgaccccaggagtaccctaataaagaaagcatgccaccggcacaagttgctctccgcgaaattgcccgggggaagacagttagaccgaatgacgtcatctcatatattgtgacgaacggagactcagaaacctcgtctctgcctcctgcgaagcgatcatacagcccacaggatgtgctgaagccggattcagggctcaggccagatgttgagttctacatcctgaagcaaatcttccctcccattgagcgtctctgtgccccgattcccggaactgacgccgtgcgtctcgccgagtgcttgggtcttgatactcgcaagtatcagatcaatacatctagctccagcggccagcagaacgcggagatcaccccgctggagtcccagatcccggattcggttcggtttgccaattccaagcggctgtccctaagatgccgatactgcaaagaacagtctgtgtatgagggtctagtgacttcatctcacatgtgcactgctcacggaatcatttgccccaaccagagctgccagaaacccttctcagtcatgacaattgtcgcccaactggagaaccagatccgcgaacagatctcacgatactatgaaggctggttggtatgtgacgattcatcatgtggcaatcgcacacggcagatcagcgtttatggacaccgctgcttgggcccccgaggtcgtgcagaaggctgtctaggccgcatgtcctacgagtactcagagaaagaggtatacaaccagcttctgtacttcgccggtctctgggatgtcgagaaagctaaggtcgctgccgagaaggagaccggagaaaagaaggacagtgttgccgcccttgcagagttcaaccgcacaagattcggtacgatcaagggggtggtggacagctacctgaagaagtgtggtcgtcaatgggttgagatggatggtctcttccgcttcatgttacaatagatgtctcggtggcgtatggtttcggatgtctgtaaatacataaggatactgggtctgggaaagttagcatagtcatgatcaaatcaaaacacatatatttgggtcttcgcttagtctccccccatagcttctgaattactctgaagacagcaagttgcgctcggtacgtgcctatggataaatatgcgcctaactatgtagctgtaatgaatagttagttagttagttaactaactagttaactacttatggcacattgattgtcaaggcatggttagtagtaattcaggcactaggtagttaataccttcctaaaatggctagttagttatatgcgtcttatcttatcacgataccccccaaatctcccgcggtcccccactccgccattcttcacttcagcttgatcgccagtgcagagcagacacccctgctcacttgctgattggctctttcaatgatgtctgtcaaaagggttttggttattgcaggatcagacagctcaggcggagcgtaagtccaaaatatccccgcaaaaccgaccggggaaaaaagctataccccatcaacctatctacgaagggatacctgaccttatttccctatcatttacgctatataatggttgaagaaaagctaacacattcaagtggtctcgaagctgatcaaagggtccttgcggcccatggatgctatgccctgactgccaccactgggttgacggcacaaaatacactaggcgtgcaagacatctttgttgtgccctcggaatttgtgagaaagcagatcaatgctggactggaagatgttggtgccgatgtagtaaaactgggtatgtcatttgcatttcatgattcgtacttatgtagaactgccactgacggccctaggcatgctctcatctgccgagacaattgatgtcatcgcagaaacactactagctcacaaagtccctatcgtcgttttggatccagtatgcctaatgccctgttctcaatctgtcatactaacaagcatcaacaggttatggtgtccactagtggctcccagttgctacccgagaaagcagtcaaggaattacggacaaaattgcttcctttgaccacgattctgacgccaaacatcccggaagctcttctcttgttgaaagacgctggtgcagagacccccgagccgagcaacttagagggaatggttgagctcgctaagaagatttgcttattgggtcccaaggcggttctccttaagggaggtcaccttcctttgacgaaagaccacaagacatctcaagacccgaaagaaggaaccttggtcgtggatattctctttgacggaacggcaaccaccttattcgagacagaattcttggtatccaaaaatacccacggcacaggctgttcacttgcttcagcaattgctgcaaacctagcttctggcaaggacatgatcagagcggtccggagtgccgtgcgatttgttgaggtcgggatcaagacgagcattgacctaggtaaagggagtggaccgatcaatcatttccactccacgtacactatgccctttgcgccgtatgtgacatgtcccctggatcttttgtttctcgtcgtcctaatagtatgccatttagcggccgattctttgagtacgtcttggaccgccaagatgtgcagcaagtgtggcaccagttcacccaccatgaatttgtcgaaggcatgggccagggtacactgcctattgaacgattcaaggcgtaccttgtgcaagattatctctacctggtaagacagccgtcttcaatgcggttgggggaagacattcaacttatcaaaattcaacatataggtacaatttgcccgaagcaatgcgcttgcatcatacaaggcgaagagcatgagttcaatagcagcagtaagtgctcactatacttggtctcaataacaatctaacacagtcactccagtcagcggaaattgtcctccacatcaagcgagaaatggcattgcacatcgactactgtgcctcctttggcctttctaagcaggagatggaagggacacctgaaactattggtaagccggtcgtacttccaagattctttataaactcgatagatatgctaacgtctgtatttatagcttgcaccgcatacagccgatacatcttagatataggccaatcggaggactggctagccctccagatggctctcgcgccatgcttgatcggatatggcgccattgcgaagcggctgtatacgggggaaaccacccttcgagatgggaacacctactggaaatggatcgagaactacgttgccgacgactacacgaaggctgtacaaataggttcaggtaagtcaggttatgaaaatcaagtgggacatctaactgattcctgtcatgtcatagcattgctggaggatcacatgcaacatgtgtcgcctagtcgcatggaagaactaattaagatctttgttcgggctacggaattggagattcgtttctgggatatgggcctcggaggtaaggcagtgtaggtttcacctacacctatctgaaaatacatgccctctttcaggttgctgtgattacttgagtatggattacggtgacctcgggagagataaccgcacttcagcgtcattaagctgtctgtttgcttccagaatgatccataatccataacaattcacctgtgtgtacataaaagcattaatcgttgaatttgttgaattaatccccaaaattcacgtatttgcctcttcctaacggacgattctcgaaaatctatcacttttccgtcatttagaattagaatccgtcgccacaactgaattcacaaagacactgcctcatcgccatctcaagatttgccccccttgtatccatggaccgttgatgcatggcgcaaatctaaaatttcctaaattttctgcctgaggttgatgacggcgaccaatccaaggcaaattagacaaagccgatgaaagcggtgaattaccactaaacctggttaagcaggcggtctaaaaggtacctgatccaggcctagtcatgtgatgatagaaaaatacaaagaggagctaagcctaatctaatttttactcgcgcctcccctggggatttttttattttttcctctccttccttttctttcaagttcccgcttcctacttcttgtcaacttgttttttttttcttcttcctttcccatccctctcctcatattataatccctctctctatcccccaaatcaaccctttcgcagaatcaatcatgtcgtacggctactctcgcggcggcggtggcggcggtgactcttaccggtaagttcattctcacagagacttctctttgtctcatctgtctatctcatcaaatgcacggttttctggcaaaaagcctcgagcctgcagttgttcgcgatggtgctgtgcctggggatcttgaccaagatctgtctcgcggtttcccaaacagtgcccaatagacgccacatcgcgagaagaagaacttgtgctaactttgatattctagctcccgcggaggtgacggcggctacggcggcggcggtggtggttacggtggcggcggtggttacggcggtggccgtggaggtggttacggcggcggctacggtggtggtggtggtggttacggcggtggtgccggtggtgaccgcatgaacaacctcggcgccggcctgaagtctcaggactggggtaggtccattctaacagcaagcgtgtttgttgacgcaatactaactttggtttcacttagatcctagcaccatgcccaagttcgaaaagtcgttctacaaggagcaccctgatgtttctgagcgctcggaggaagagatccaggccttccgcaaggaaaaggagatggctgttcagggtagcaacgtgccccgccccgtcaagactttcgacgaggctggtttccccgcctacgttctgtctgaggtcaaggcccagggattcgatgctcctactgctattcagtctcagggctggcccatggctctgtctggacgtgacgtcgtcggtattgccgagactggttccggaaagactctgagttactgtctccccgccattgttcacatcaacgctcagcctctcctcgcccccggcgatggtcctattgttcttgttttggctcctactcgtgagttggctgtccagattcaggctgagattaccaagttcggaaagtcctcccgtattcgcaacacctgtgtctacggtggtgtccccaagggtcctcagattcgtgacctctctcgcggtgttgaggtttgcattgccactcccggtcgcctgattgatatgctcgaggctggccgcaccaaccttcgtcgtgtcacttacctcgttcttgacgaggctgatcgtatgcttgacatgggtttcgagccccagattcgcaagatcatcagccagattcgccctgatcgtcagacttgcatgtggtccgctacctggcctaaggatgtccgtcagctcgcttctgatttcctcagcgactacattcaggtcaacgtcggttccactgacctgtccgccaaccaccgtatcacacagattgtcgaggtcgtcgcggacttcgagaagcgtgacaagatgatcaagcaccttgagaagatcatggaggaccgctccaacaagtgcatcattttcactggtaccaagcgtgttgctgatgatattacccgattcctccgccaggacggctggcctgcgctttgtaagcttttgataggttccccactggcacatgtgcacggtactaacatattttccagccatccacggtgacaagcagcagaacgagcgtgactgggtcttgaacgagttcaagcagggcaagagccccatcatggtggccactgatgtggcctcgcgtggtattggtatgaacaaactacatccctccctcttcccttcccccttttttgtccctccttaggggcccttggaaaacactcacccgtgttgacgttgtgtgatacaatggcacggtgctcaactctctcgaagcacgtcggtgtatactcgccgcgtccaggcgcatctggtcatcctaaatggttcacatgccaagaggaccttggactcacagtgcagcacagcagcaggcattctagcttgactttgattcttccattctccatctcttgtgtgacaggctcgtagtagagtccaagtttctttcacacagcgttgttcttgaactgttgaactgttgaaggctgcatttccaaggtttctctaggaccacgataacacccgccatcccatggactcgcttcccttgggattttcttcacagaaacccatcaagagagcagtgatgcatcaagtcctgcacgacggagaaagggtccttcatggccatactcctcatatcccccactaatgttctatttgctaacgatattcctctgaaaagatgttcgcgacatcactcatgtgctcaactatgattaccccaacaactcggaggactatgtccaccgtattggtcgtactgctcgtgccggtgccaagggtactgccattaccttcttcaccactgacagtaagtttaccattcatgtcttgggacattagcaagttgtactaacgtatctttctccagactctaagcaggctcgtgatctgattactatcctcactgaagctaagcagcagattgatccccgtcttgccgagatggttcgctacggcggcggtggcggtggtggtcgctggggcggccgtggccgtggtggtggccgcggtggctggggtcgtggcggcggtggtggcttcactgcctccaacgctgctcccgtcggtggtaaccgtcgttggtagatgtctcgctgctgctccccgtacagtcagccatgttgcctcgtattgtgctatcccggtagactctttcccatttcttgacttcatgcgtaacttgggcaggacggcgttatcttcgatgtcatagatagtttttatttttccttctgtgcctatgccacagcggactttttaaggtctcggatctcggttcatcagctctggtgggattccagggcatgaattctcacgatgaacccttacatgtttactagtttcaaaaaaagttcatgactcagagagttcttaatctgaaataatgattatcctttaaatgttctatgttccattcactatctctcaaaaccaatgtattgatgtagatgtatgtgcctatgcacctataccaagcctcacactatttctgcaaccagctttctacctcccctgccaaaacctcatgcacatggctagtcatatgacccgaattaaaccagaaatacctctctaatggcgtcggacacccatacttctcatactcaacgcaatatccggctgatcatacccagcacagaaatccgtcgtattcacaatcccatacttccagggctcatcaagcatatccgccaacctcgcatgcgcatcaaagagcataacccgcgcctccctatgcctttccgaaaacgcagccgcatgatccgccagcgcggcattgtaccacccgacctgcgtggcgttcggactcgggttactctttgcttggttccccggcgtgcggtctagcggcggcaggttcatgaacagatagcttctgtaacccaggctgtagagggtctctacagattcgaagagtgtgtctgtgagactttggtagaaggttcggaagtcgacggcgtattcggcgctgtcgtttatgtcattgatgccgatccagagtgcgattagggtcttgtattggttgaatcctgggaggttttgctcgagggctgggtggccgtattgcttgaattggtttatttggtctactagcgagactgtgaagttgtggtggaggggtgtgcttgttttcggttagttggaatgttcgtgaaccatgtagattctggccctggggattattcctgtgcttactgctcggttgatatgtcggcgcctgcaaatgcgaagtcccagagttgctttttgcagtgttgtggtgaggtgaggccttggtcgacgccgcaatttgtgagatactcgacccagttggggccgccttctgctgttgcggtctaagcatgggaaattagtatctaagtgatagcatgtttgattctgtcgcgtcgaggtacaggcttacttggttctggactatctggttggaaagcagcgtttccgcgtcatatgcgaggttgaattggtctccaatgaaactgtaattctggcgtccgagggttccttggacataagtgtaggagtcgccgaaggcgatccttctagggttagtgctacttgagaacttgaaggctgaatacacttacagggccttggtcgatgaccagtcgaatttggctggttttgatagaggaattgcgctggcgaatgtagtgccagaggtgatggccaagacgcatgtcactagaagaagcattgtggctattaattaggtccagcacacattgaagtataattgcatagatactacgatatgcttctaggcagtacggaatatatagagtggacaatatagtttgcctaaccccgcaaagggtcgacatccggggtaattctgcagagtcgacggaaactatttttccatcagttattttactcgacgctttttgaattgatactttactgttaagtgaagcaaaggaagggaaatgtggtccggaacttgtggtactcacagaaaggcattcgatatattattacaacaaatataattagtaaccccatggaaaggatatatcaacctacccgattggtagctcccatatatcaaaccggattattttccaatatctgacgatttccacactgaccggcataccgagttgccccggcgcctacaattatcctctcacagggcaaggctgcaagcggccttacgagtcaagtcagcatatagccacagatgctatccacggaggtcttggtggattatattgcttgtcaaagaagaacgattgatagcggataacagactccaagaaaagcgaaaagaaggaacatgataccagaagccagtataagtactgactggggtggggcgacaggcctggcgctaggtaccccagctttatagaccttacctcatttgacacaagtgtgtgatgaatccgtgatcagtctacacccttgggctaaagccttatttgcgtatactattttactaggggtcgatttcaaacccgccgagatcttcgcttgtgcatggctcgacattcaagctttatgcttaaacggcccacagggaggctatgctgtgggttccttttagcgttccatagcctaacaagctctgaaataccaacatgtaaacctggggatcagtaaggttcagccgttatctttgtgggttggttttgtatacagctgtatacattattgcgcttgtgtctggccttggaaatgtaatggatcatgcacggatatttctgcgctagccacaggtctttcgagattatcacgctagtacaatgcataagaatacagagccacgtgtaacaagatgccaggatagttttgcgatctgacacaagtaccaatttcccatcaatctggagcagggtcttgacaccaagactttaacaacaacacccaaaaatgagagtcccactagagagagaccaaaaacagacctgcatacatatcaatgcatgtagtccgtactcataaggggtacatagtctgggaagcatgtacctacatctacatcccacgcatgcacgcatacaacgtccaccgcatgttgaaaacagaatacatgattcaagaaaaacgcctaagagagcgacgtgcagtagtgcgggcaacagactagcgtcaaccttagaaagagtggacggagtaagacgagggctcaattcccgcagtatgcataagtagtatgcataagcgcctcgtcttcaacgccccatcgccaccgagagttttcatccgacgatgcacgtcggagacaagggtgggtacagctcatgttttcggcccagattcgaagcgaaccttaagaaaatttacccgcattgcccagcttgtccgtggccaacagggggctgacccggcgccaggatgcactagtaagacaacgttcgctgtatcaggtgatagtgcgccactcagggaaataagataaaaagggcaaaagtaaaaaagaaagaaaaaaaaagaaaaaatatccttttgtttatcttctttcctttgtttcgtattctctagagcagacgtagaacatgcatggaaaatatataacttgctcgggagatttgggttggtcttggggtttctgttttggactactgggcagcaggattggatattgaatattggcaataatatattactttcacatgtctttaggagtatgatgggtatgatcttcgataatgtgtcactttcttctcgaaaggtaaaatgggttggcaaagtggcattggatttattggatttactggattgacggccttccttagatccctgtctcgggatctgaatccctgcagatatcagtctcatttattggcggaatcatgccagtctcctgccatttcaagatttcaatatcaaggccatggccgtcagtatgtcttttaaccgaggttgcattcagtacatttcggtctcaacccctttaaaaaaattaacaagaaattaaaaaatttgaatgtgaaaaagaaccggtaaaaaaaaagactcagttggaataagagctcaatgatcatcatccggggctgatccgcataggtctctctaacgcgatctgccgaagcattagcggatgagacttactgtgtccggcgtagtctaccagcatatcaactgcactggccaagtgtggagttttagggaaattgcggtttcttcccagagcacagacattttcctgatatgaacttcgttgatttacggagtagggagtagggagtagtacggtatgcgcatcctgttccttaactctaaggcagagagtactggtcttctccccctgagatgtgtccaagttaaagagtaactccttagggagccaccgttctggagaagaataaagccaagccttttccctaatgatcgcccctgaacgactacaataagagcttggaaaaagaccggagaatagccgtatattgaacctaggctcggccggaccacatgtgggaacattttccgtcttttctgacctccgttagctcgtttaacctcatttagagcaaattggcgaagtggacattattctgatattattagattgcacaggtaatgtgataatgtgataatttgataatatacaatatacggagcacaatataaaagaacatgcagaaatggtcccacgtgcattgagtgacacgaacatctgcaggtcctgcttttgggtcaattgagacatttaattcgagagatattctcttgaatctctctttaccgtccaaattaaaacaatcagccacagccgcgaaaggcgcctcgtatgacattatatgaatatagccggggggcagaagagaaaagaaggactccaaaacctacaattatacggagtacggagtactaagacgataaatgcaagcaggacatgaaaactggggacaattggagctttcgggatgatcgtctcaagtgttacaaagtacttccgtatagggccgtattattgatgacctccgtgtacggagtactccgtacagcgcgactggatacagagcggctgcggcgtccaatgattgacgcgccatatggatttgatattgatcatcccattctgctctcgacaccggatatcccgcactggacactgtgtgttgtccgcgcggagtccgtccggtcccactatgtcgtttgggattgtcggtgtcaatttgtttctatttgttcagtctattttggattttggctattgccggacattggattattatttctccctgataacaaggtacttggtcctccgtacttttgcagacaatagtacgtgacttatcaggccgtgtcggatgcaaaatgatcctgcgaagaataaagaataattaattaaatatcagaaatcactaaaaatcatccacttgctttttcctcaccggcagtggaggaacaggttccgcgcctgcggggtgaaatccggccccctgagaacgccaatcatgaattaaacagagagtgtcagttttccgagctgagagccttgcatcttgagaattttctccctagtttttcccgtgttcttcctatcagactcacatttatccagggggtgtacaacatacagcatacaacatacaacacatacgggatatacggtctttgatcccccactatctctgattgggaggctgaaaagtgaacattaacgagtataacggataatggggtacgaagtgcaaaaggggaactggtaaatactgtaagaattatactggcctccactatgcattgagcattgagcatacaccgatcgtaccggagagccgccgaagactccgctcgcaatttgatgcgtttgaccaattggcggttatggtgggctcgtcccacggaaatcgcgctaggaaaacgatgggccccctttctcctcttttcttccttggtacggagattggagattggacgatgtggtatgtgcttttgtactataattatcacatatatatgttgtatcaatagaaacggtgtcaattgacagattaaacatcaaccattcgcagtggtactatgtaattggagatctagattgcagcaattgggacttccgtcccaaattgaaccatttgatctcgaagacgtcaatcttcttacagaggagacaagtccagatgtcaggagatgggctccgaccaccggggttgttattccaccgtccccactcacgcgtttgtaggtatcgtgacggttacgcgactactccgtagatactcttgccatgactcgataagtttcatcgaagagggtgaacatgactagtacgtagccagccctggagtgatgctagatagcggtctggaagaggtataagcctctttgtattccggagtactccgtactttgtataccttgtatatatacatacaatgaaggacagttctgcacagaagtataccaaatacctgtaatcaaattgcaacactgaacctccttttcaggaaaagaagctatcaccggcttcaaccgcctcggctttgaacctttacagcagactttggcgctagtctcaaacaagtcaggcctatccaccgagcttctccagtctccactgtaccccactagttttctcctattggtgcagggaccgagtgccttcgtccacactagccctggtcttcccgagtcccatcgcttcttcttcccccgacctgcgctactcctctttctgccctagttccctccagtatctccccctctatacccctttgagactcggttccatctctcggttgaggttcctcgggcacgccattcctagcgcccaccttcttaatcaggagcccctggctctgacaatcttggtacccacggaccatatacgctaggttctccctcgacgcacccgagttgcgggtagactaagaggcctccagttgggaacctagtagtccttagcaaaaaacaacaacacctgtatatatcattttatgatcttccatccatgggcaataattattaattaatgatagaagaatttgagagaagtaagttgccacttctcccctggatggttccgcttttttttttcccttttcaaaaccggaaactggaagaaaaggaagaaaaaaaaatattatcacacggacatggaaagcttagccggtaaggaagacactgaggggaaagggggccaagccagttaaatgtcggagtattgtgtggaaaaagggaatagtccgagatcagagaaagtaaattatttattgcatctttttttccttctttgatataaatgtttctcctcggaatcttgtctctgtatttatagtgtatccctttctactatgtagtatattttgccccaatacgggaatggatatatacaatatacagatgagagtgttatattgtaaatatcataagaaaccaaaatcatcacaatgcccaaaagatcaaaagccagaaaaagaaaaggaaaaggaaaaggaaaaaaagaaaaagaaaaaaccaaagaatcaaaaacataaaagcaatgcagatgtaattttcccaccccgaccaacgatatcgccaaccaaaattacgtggtccaccttgaggatccacagcatcctcggatcccacgaggactgccttttcctttctcctaatcgttaccttttaggccgctccaagtcgcgttgactcctggcctttttttcttttactagtctctttagtatccccgtggctatttttccgccccggtgcctcgtgcttaccgccacctgcaaggcatcctccgaactaagattaagcatcaaagcatcttgggaccttcttttttttttttcttttctttttttccttttttttcgaagctacgcgctttcaacaatttacaatatcttgaatgttgtgaattgattctcttcttctcttctctccccggacctcttatctccaaagcatctgtgcgcaaacctgtttgatcagcgtttcgcgagtcaacttcacatatcaattccctggggattgaacggaaaagggtacgttcacaaggaatattctacctaggtagatctgaagaggttagccacgattccaacgtggcaaccctagtctcccatccccttgcttggaacgtgtcggacttgtcaatttccccgactttttcccacttgttatgttgacgcgtctccacagatccaactcaagaaactcttccttcaatagattcgtcggcatccttgcgcgcgaatctcctcttttatggacaaccggcccgcctccgagtacgcacagccaggttcgcaccacccaaacaccgtcaccgacgcaccttctgaacaaaaacctgcagaccaaaattctgctgctgctgctcactacaccccgcaacccgaggtccgccctacgccgcagtacacgccgcagccgcagcctgaggtgcgacccaatatttcctcggccaacaccccccagtcggactacggtctgaaccctccgccgaccgcccgctcgcctgcctaccaggactaccttcaccgtcctccccagtcatacgcccccaactcccaaccgggcgctgcggcaggtatggctcaagcaacaagtccgttcatcaacaccttgcctacgggcccgcgcagtccgcactcaaagtctgacgcgcccgttcctatagatccttcgcttccggccaacagccccacctatcctcccccctactctccctatcagcctcaggggcacgagatggcgcagtaccagggtcacccccctccgcctcagcatatgtacgcgcgtccggattggccgcatagctatggacaacagcatcatggattgccgggaccttacgcttccccggccacaacggttggttctacctctcctgttggtgcacttgcagggccgcgttctccaaaggtatgtttttgatgattccagggggtatttctgaaggcttttcactttgttaaatcattgttgtcttggatgcctctggggttgattatacggtccgtaggccgtcctagggatcgtcaagaacagcgtgctctgcccctcaatcgcttccttttgtggataggattgggtggttttccaatctattggggtttgatcaaagctgattcccagtctcctttaatctaggtctactcatttgtcccaattcctggcgcacaacagcacaagcgtcctcgtcgccgttacgaggaaattgagcgcatgtataagtgtggatggaacggatgtgagaaagcatatggtactctaaaccatttgaatgcacacgtcactatgcagtcgcatggcgcgaagcgcactcctgagggtaggttcatctcattttctcttgcttttagatagttgggggccaatgcgacggagatgttgaatctttcgtcgcaaatggctggatcgggttagcgccggctgctggacgctagtgagttacactaggtgtcgcggggcccgcagtagcgtggccgatggcgtggaggctaagcttgtctcttatcccttcccgccgtccccccgctagcaagcatactctatgctatttcccattttggaaactggttattaatatccaagttcactgctgactttgttcttttagaattcaaggaaatccgcaaggaatggaaggctcgcaagaaggaggaagaggctcagcgcaaggctattgaggaacgtgagcgtgctgccgctcaggctgcccaggccaaccaggtcgagcctcccaacccctctgacccatcccacggacagccacctgcctacgccggtggagtccgccctcaactccctccgatcggttaccagcctgcggatagccagcctcccagccagtacggtggtcctcctggcagtggcatggtctaccagaacaacgcacagatggcctaccctcccaactaccctcactctccctaccagagcggacctgtgtacccgcaacgtgagtaacgtcgccgcctatctccataccaggatcgaccctctggacttctctttcgacaaggtcatccccgcccgacctgtcctgctgatccataaatttgctacggcttccagagactcaatccgccaactatccgcaataatctttcccacataatcacttcttccgctatggacctacacggacggaaatgcatttgctttttctttcttatcacgatatccccagtccttgactaatgttctcgtcctggactccgattcccatttcccccaatacaccacatccttccactcccaagtctttcgtgctatgataccaacctctgcagcttttattcctgatctgtctaagagtggcctttccagctttgttctatacctgtcatcctttttgtgttagagtgcattgagctgagagggtgtgttgcccttctgcaccttctctccgttctgtttcctacttgaaatctgatgcagaagtggtgtatgtcttatctttgtttgcccgtttgccggggtcgtggcttcaaggatggtttgggcggtggattatttgcatctgttcattatcaacagcattctcccaaaatcgtcttcccgggggttctttgatttagttttgtttctcgtttccttttttgttcactttgctagcacccaagtgtgttctcttatctcctctctcttttcttcatttcctttctctaacgtacattatgctccacggacttatgttccaatctgattatgtgtatcattcattttcacttgtccttttctatcttagtgcattcattatctgcaatcggcttaatattagtggctacctaggtattcttgctgtcgtgctgatgtggtgtaaatatcccaagaaattgtgcatgcgaaagatggcacgtttccagtaaaaacttgggcaagaaagtagaaagcagaagttaccaatgcaggctagtataatcacaacccaagagaaaagaaaaagcgaaagccctgaggtatctctgctgtgtgttagcctaaactaaatatgtcataaaaaaaaaaggcatatagagccgacctagagaaccaaacatgccttagcaggaagaataaataagcaaacaaccacaatactatcctaatataagccacacctaaccagaataagcaaaaagtagtaccggcacttaccgtaggccgagcacaataccatgcattggccgtttgatgtgcgtacgcactggcaactactgcacaaggtacatatgtacctgactagaaccgaataagacaaagcgcagcatactatatgtggactgtacatcatacatgagacaggaggctagtaccggaaggcgtctccacgtgttggacattagtatcagccaccgatatcatcgtggggaaactaattttgcttttagagttatgttattcctaattgtttctagcttgcttcctcttcctgcctaagccgcgcggtatatcacattgcttagcgcttagtctgtttctcttgtctccactatccaggtggtctgttagcttcagactagtgtcgtgtgctactctaggttggccgtgcatcttacaaagtatagtccggttgggctagggtggacgctagctaggcggaatgtagtgtgatctgcatgggtataagtatggagtaggtaaatgagacatgtctattaaccatatgtagctatgcaaggtctttgattttggatcatggattgatggtggtgtatgttgttggaactgatcttgggaatacttgggcataatccaggacctgaaacctgtggctttggttagatattgaggatccaataatagaaaatcaatgagacggagaacgttatgtagtatgtgaagtctgacgtgcacttcagtatatgttgatttaaagtaggtaagtacacttcatccacggatcagtgcatgagctaagtgtaacgcagatccacggagtgccccgaggaactagtaaactagtgaagtacttaaacgcacagaagactctgggaaatgtgctctagcgttcccgtcgaggcccgcagggaacatgggttgaatgggaaactaaactacttgcagtctagtcggacttggaaggaatctgaggtactaatggtgcctcaggcataaagtattgttgcctgaatatataggcgtgaagtctagacccgatatgaactagcgtccagacaatctgcgaaattgtctcgcggtccatgtccaacacgcaatgaagaagtaacaatctgttcttattttctcattttgccactttgtcattgttgaatttgtgtctcccttatagcattgtgcaggacacaagcttaatacctggagattactgttaatccggtcatgacattccggtttccgggctcgctcgtgaacagagctttgcgcagccgacttctcaccgcgcaacaataccgtgctactaccgcatcccaacgattaccgcagacatggatcgcatccagtgattatcgccgatttacctcctcctcgtcctccttcaaccgctcttccgatagagacagcgatgctcgccgcataggacatgttggcgagaaacattttaggagtcggcatggcaataggcgggaggctcagcgtgtcaagtctagggagagtcatgacatcttgatggctattgcgtcgggttcgtttaccggacggtacaacagtgagcttgaaagttccgaaagtaaggctctggatccagaggctgctgaaagcgagaacctggagaatgatccttatgattaccagcatggcgaaaacgaggtggaggagggcggtgtctctgatgaccagacacccaaagaacaagatatcgaggccgatattgaggccgatgccgccgatggcgaggctcccgaggacaacagctatcgtggccagcctcgagctatgcccaaactcacgccgaaaataatcaatgaggagctgaaatggttaaatgaccctcgcaaaatggcggatcgggttgcgcgcattttgcacagtggtaatccggccctggcggcggccttggttcgtgctggaacaaagcaggggatgagatgtgatgttgcctggaatcatctcctgcaatattgcatggatcagaatcacccgcaggctgcgtttaagttctacaatgatgtgagttttgtcgtgctgtgatgctgccattcagagagttacctgggattttggggtgtggattttgtatactgacagaattcctctcacagatgaaaaagcgtggcaggagaccaactcccagaacgtacacgatcatgttgaagggcttcagctcagccccgaggtcattggatgtcgccaaaactgccgcctctgtctaccgctcgattagctcaccgaactctggagctaagcttgatattatacacaccaacgccatgcttaccgtctgccatcgtcacggggatatggatcggctgtggaagattgccggtgaattacccgaagagggaccaggtgcaccggatgctgccacctacaccattatcttgaacgctgtcaaattcgcatctcgcagagatatagagaaaatgtctcctgatgagattgacaaaatcctcgagcggaaggcccaggttattaccgaaggaaagcggatttgggccgatgtcgtctggcggtggaagaaccaaaccttgcaaattgacaatgaacttgttaacggcatggccagcttgcttctggaaggcggtagtgatattgactgttacaatgtcatggaattgtacaagcaaaccatgggaattcccatactgcagaagcgacccactgaaaacgagaagacgacccgccgcaggatcacccccgagcaaactcaggccatggaagtctcagaggctacgcggcaatcaaaattggaagacgttccgtttgtagacgaaaacgatcgaccaatccaaagtttcaaatcagccgaggaagttgaacaagacttgaggaaagaagtggaagaagagatggagaaagaggaggaagaagcggaagtggaagaggaggaagaggaagactttacagagctcttcaagcctgttgttcctcaggcggaggagctatcattccttaaaccggacagcaaggaactgactcttatcctgaatgcttgtttcaccatcacccaaggagccgaaggtggacaggcctattggaaatacatgactttggacgaccacgaataccgcattgatcccgataccttcacttacatccaatatttccgcctcctccgcatctcccgctccagcaaaatcagcgtcaaaaccatgcgtgagcagatggttccctccggccaagcaaacggaacagcattccacgtcgctctcagtgtctgccgccgtgatcgccgcaaccgctcagttctccagcacgcgaacgagctgctcgccttgatggacaaagcactagttctacctgacatccgcgtcctcgaaggctatctggaaatgatccagatcctttccgccaactcgtccgtccttctgcagctcagaggactcgaggcaagcgatgaccccacagcctctaaatctcctagactggagtatctgggcaggaagctacaagcgaagctgcgactagttgctatcgccgccttacggccatatatcctccagctgcatgaggcaatggagcacggcaaacccgagtccaagactcgctggagtgccatccagaacacactttcggattctgtcgccggtccggcagctgtgaagatcatgtcgcgcgttcgtctggcggttgatgacaccctcaagccggactataaggcttacgtctcgaaggctgagcgcaaggcccttaacgatgactcgaagatgctgaagaagtattctgacaaggacgttattgagagcttcaagaggaagaaggtatacccgacgcctcagcagaaggaggaggcgcgggaacgcatcagaaaattccagtgggaggctcgcaactctcgggaccaagaaggttccgatcagaaagaggactcttcttcgtgaggagcacggattgaggcttagtattatttcgtgttttggacacgacgagaccgagtgaggtctcgattgtattatgtttgtatatcacacattgggggctatagatggcgttgcatatctgcattatgtacataataccatttggtacattctctacttctaacatgaaacaataatcaagattataaatgggtttgatgttgctatcgacttgttagatttatgtatgatccctgtcctccgacatccaaatctcatcattattatcctatcttttataccccatatcgacaataacgaacatcaattcaaaggagtatagtattcaagacttcgccaagtcgggttgttgatgaggacaatgtcacgcaatttgatagccgatgatgaaatgcatccctacaacgtgttagccccggtcaccaatactgatgttacgcctagggaaatggtccgatagattatagtagtttttgctggcattagtgttcggaggccaaagatatccacaagacaatgtggtgattacccaggtacagtggggatgatggcgaatgtttggtctatggcacgccatatgacgttctgagaatgcacctgtcggggctcggaggtctgccgtaccccactcacattgtcgatggcgcgagatacgtgtgcgatgaacgaattccaagttaggatggtgcgggggtagtatgcttgtgtaaagccgtcctcccgggctttgttatttgggacatggggggctgtctcattcttatagaacatcgctcaatcattttgaactttcgcgagaaactagaacgtgagcaagaaagcaagcatcttgtatattgaaacctgcgaatcatgggagacagtgcagatgctagccagaatggctcagctgcgaacaatggcaagaaacaaatcttgcttaatgcttttgacatgtcaaccgtgggacatttgtcccctggacaatggaaggtcggtataggattgtattcgcagggccaaaatgctgacagcttcacagaatcccaaagacaagtctgcgaccaagcggacactcggatattggatagagttggcgaagctgttggagcgcggtggaatcaatgcgttgtttctggcagatacaactggaggtcatgatacctatgagggtaaattggacgagtgtattcggcgtgcagcgcaatggccggtgacagacccaactatcgtgagttccaacaaaaccaaaagttccgatcagagtctgacttcccaattagcccatttcggcaatggctgcagtgacaaagaacctggcatttggcatcacagcgtcgacttcattcgagcagccctttttgctggctaagcgcttttcaacgttggaccatttgactaatggccgactgggctggaacatcgtgacctcatataagaaagcagctttcaaagccattggtgtggatactccaattgagcatgacgaacggtaccgccaggcagatgagtatttgagggtactctataagtgagttgcatgcccatagctcggttagatgatggctttggagactaactcgtgcttgtgcctatagactgtgggagggctcctgggctcctgatgccctgtcgcccaatgccgaagcagacacgtacattgacccggataaagtccgccagatcaaccacaagggcaagtactactcattgagcacacgacacatcgtcgacccgtctccgcagcggacaccattccttttccaggccggaacttcccctgcaggatcggaatttgcttcgacacatgcggaggcaatctttgtctcttcccattcgccagaggtgttgcagccgaagatcgcaaatatccgcgggctagctgcagaacgaggccgtgacccgcaatcaatcaagttcttcagtaccttcacgccaattgtaggcgagactgacgaagaggcgtgggcgaagtatgaggagctgaagaagtacgcctcggtggttggaggactggtccttttcagcgggtggacgggcattgacatttccaaaatcccattggaccaagacatcaccgcttcagattcattggaggcaaacaaagtcactagcttgcttgactcgctactcacgaccagcaaggatatcccgcgttggacgcctcgtgtggttgccgagagggctgcaatcggtggtcttggcccagtggctattggaagccctgctaccgttgccgatgagatggagcgttggatccgagacgctgacctcgatgggttcaatcttgcctatgtcactacgcctggcaccttcgaggaggtggttgacctgctcatccccgagctaaggcgacgcgggatttatcctgagctcccagacccctcagagccgcccctcacagcccgtgagaaggtttttggcaaaggacagaaagagctcagggctgatcatattggaaacaagtacaagtacgatgtgtatcaggaggacgagccttatgttgacggtaccgaggaaaactgactgtcgaatgacatttaagacatttaatgtctcatttaatttatggagatagaagatcattgaatgaaataagatcagaaaaccccataatacatatgcatgcaagaggtgtggagaggtgaaaggtgaaacaaaacgtgcctggtaacattacccgtgacccagtacgtaatgccactctagcctttccgggacagcttggccaactccctcatactcctcgattaccttgacctttcctgacttcgcctctgagaggactaaaactaaaggaggtgccattattgtgttagtatttcaatcgacacgaccataccacgcgaaccatggctaccgtacaccaaggccacccccatgatgagccccatgatgacgagtctctcctgggtgatgatttgatcgaagccgatgatggtgagtactatcatttcccccagtgactgccggagtatcggcaaaatgctaatttgacgtgattctagccatcgaggctgatgaccccctgcgcgatacctccgacacggcccctctgcgaggcaacattgaatccagctcgagcaaccgaggaaacgcctctggctatggcaactacctaacatcctctattggtggtgaagatcgccgtgcgacacaaaataccatcgacgagagcgtttgggagacattgtcacgcgacttggttgccgtgtgggagaagatgcgccaggtgctttggccgaagtacttgcttggaggtatgatgcagcgtggaggcagtggcactgctgatgctgaacaaggtggtgtgtctggattcggtggtaacattcgaggactcgttggacgctggccggatgccgacgtggtcctgcagggtggcatgagcgatgggttgcgggactgggatctctggtaagccatcctaccctcggagaactccgtataaaatctaacacagggcttattttaggggtccgcttgtcttttgcctggtcttgagtttgttcttgtctatcgcaaagggtgatcaatcgtcagtggttttctcgggtgttttctgcctggtctggatcggagaagcagctgtgactcttcagatcaagctccttggcggcaagatgtaagtgctatggatcatccccccgatgtcgcagttagctgacattatggcctcggcctgttagttctttcttccagtcgatttgcattattggttatacgctattccccttggtcatcgccgccatgctgagtgcgctagggcttcctaccatcgcccggataccagtatatcttgtgttagtcgcatggtctttagcagctggagttagcatcttaggaggctcgggagtggtgcggaaccgagtcggcatcgcagtgtacccgctgtttgtgttctacattgcgatcggctgtctctgcttcatcagttaaggctctctattgtgatattgtgctcaataaggaaatgcgccgtcacatgcctctgataggcaccggcgcaatgaatctcaataacattggattgtttgattgtttgaacgtatttgaatagcgcggataccggtatatcccaggctttgaattgaatttattgcaaattgtatccgaggcaacaatagattgttttattgaggtgaatacatgtatgctttgttcccatttccattgacgctttgctattcaacccgtttgttgggccccgcacccggcggtcaacttataagaacccgcaagctaggcttttccttcttctctcacctttccacccttccatcgtcttgttattctgctcgcaaacttcgcaattttcacaattttcgcaaatctcgcatatctcgcatatctcaacccttccattcgtcctcgatttggctggtcccaatcgatccggtatgtcatcattgcttgggcgcatagcctcaaatcccccacatacttgggcagtttcgctgacaacttccaagctcataacaatggaccgcacaggtgcgtttcaatttagtgatccgtctttgctccgacctgcagctctcttccggatctacaccctttctgccgcatgcctttctccgacgttcatgtgatctgacgatattgtcttgacagtaactgcgcagtcgcctccctccgacaatgacagcggcgaacgccctgtgcgacagcagctcaagcagactaaccttgatgctgtgggcgaaaacaaaatttctacacgtccaaaccgaaagcgctccctcgacaacacagacggagccaccgactcacccccaatcaagcgatcccgagagtgcaccccggacactactgctgttcccgcagcacgcaactccgagcacgccgcagtccccaaagataccactacccaagatgtgagtacagatgtgctagccacagcacctgtgagcacttcggttcacaatacacgtccgtcccacaacccgatcatgagccacattcccgagaccaaggtccagtttcccctggaccttgagatcaaggtctcaattggtggattcgagcaggttagccatgtgactgttcctgttgagattggtatcaaagtgacagctggagcagtctccttggcttcctcgacttccaaatccactgaaggcgaatcgtccaaaatacatgtcaccattccttctgcaaagcctactcctccatctggaaccccgtcctccggaacccctccccctggaatcccaccccctggaaccctgtcatctggagcccctccttctggagcacgatccgctggggctccgtcccctgtgacccctacccaaccattgcctgattacctcgatcctgatcagcctttgcctgaagcactcaaggatgagtcgtttcatatttttgaaaaacctgaatcaattggagattcttcgtctgaagactctctgtctgactaccgttcatccccacctgtcccatacagttcatcgaaccctgatcaccctagaccctcggttgaagcccccaagtcaaccagaaagtctccgtccgaagactcgctacctgactactgttcaccctccccgcctgtctcatacaaccctgattaccctagaccctcggttgaagcccctgaccctgaagtgcttcgttctaaccacgctcgattcctacagagtcttggaatgaccgtcggaaacgaggatgactcttcacaacccgagaagaagagacctcgtgacaattcagaggagcgcaaggctaaggtggaccaagtgagtttgctccctcgtcttccccaatccccccccccccccaactcttcttatcttccactaacacctgcttctgacagactttcaccgcgagtgcattcggaaaagcttcttccaacccttcacctttcgcaatgccgaataaatcgacgtctgatgcttcgccttttgcaaccaaaagttccacgccttctggtttcagtggcctcggttccggattctctgcctttggcagctctttccccgccccctctggtaaactcaccagtttcgcatctcccaatgcccccgccgctttctctgggtcagccggtaagctgactagcttcgcgtctcccaatgcccccgccgctttctctgggtcagccggtaagctgaccagcttcgcgtctcccaatgcccccgtttcccttgcggagtccagtaacaagaccctccgcgcagaacaatctgacgacgaagaggatgaggacggaccagtcggtgaacctgatgacacctttgttgccgagaagaccgacgagcgtttccacacacaaactggtatggaccccgcgttgttgcattccccctggaccccgaatatggcccgtgactcataccgatcggaaaattcagtcgaaaccggcgaagaaaacgagaccaccgagttcacagccaagggcaagctgtatggctttgacgacaaaaaatggaaggagcgtggtgccggcaccttcaaggttaacctcaagacggagtccgacgggaagaaatctggccgcattatcatgcgtgctgatggtgccctacgcgttatgttgaacagtgcgatttggcagacaatgccctttggtgacatcaagggttctcgcccaactactcgcgacatctacctggcgtccaaggaggacgaaaaggtagttagccttctcctgagggtaagtttccaagttctcaatttttcggggttgactataatgctaacgaatcaattcagctcggtaatgagaagccggcccaggaactttatgatgtccttaaggacatcttggacaaaatctagttcattttcacgtgctggccatggatttgtaaatgaaggagaaaaaaagaaaaggaaaggaaaaaaaaaaggaagagagaggcagagaggcagagagagagagagaacccctcttgtagggactcagtgttcttattgcagttttagcgctccagggctctttaatacacttgtgtaaacattacatcttctcgtatgcactcattatatccctaccaacatatagaaccaataagctattccaattgcatttagttaatatccttttataggttctatttacgatattgcttcacctatattggttcttttcttcttcatatcttcctacctaggtatctacccctacctcctatcctctcttgattctctaccttatatagccagtactctatccgtggtatacccgcctaaggtatacctagcatatttatctggctagtgaagaagatagtaaggtcgtgaatgccaggacctgcggagtccgtggctttctatcgttcatccggtataatcgttcgtatagtcgtccgtattcgagctcaagtacaaaacgcacatgcttgtgcataatattcatcaaatattatcgtcctcaacttttatattgactcccgactgtcttctttgattccaatttgccatgatgcgcatcgccgtagcggtctggcacctgcgacgaattccccaagtatggccatcaagtcgtactgtcatgaagcgacaagccgatcttcaacggccgtcctgatactcaatcatcaacattcttccaaccttggaaagttaggaggacgtccattaaactttttactatatagagagggtcgtgttgactttccgggggtggagagcagagggatccataattccagccattagcgaatcatctcttctccccgccttttagacttgctgaaggagttcttgtatttcacaatactgtactccgtaactataactgctatacacgtctttctccaggttgaggctatccaacagtaaacacatcaaggagggcccagatttttctacttctcgtattaactcggtggctatctaatactctacagtctacctaggtagccctaacccgctattcctgaaactcgacttagcgttagggtaacgagcccatgtcgatcaattggcgttgataccagcgcaccaattctttggagttgaattttctcacgttcagttttcaattcttcgtgcaaaacagatattaaaaagaaacgacagaagcagcagcagcaggaataaatagaattagacagaaagaaaaaaaaaaggagtaggaaaagtgttgtcttcttaaacccaaagacacataactagttagttataaaaatataactaaggtgtgtcaaaacttgtgtctagtcctggagtcactgtacgcgcagaagtggacctgagagttgattattgacacaacacgcgatctcggggccgcccctgccatctgtatagagttgtagcttcaatatctgcatagatgaactttgggataatactctgatgcacaagggtccaagctgcataattattattcaagcttggcaacttggacgatctgagacactcagccctccccagccacatctgggatctcacaagtcacagattatctgatcgtaaccccatattcgcctagttccacaatttggtcatgctgcatagaaaggcatggtcacatatagagctatagctcctacggagtactctgtacggagtattccgcactcagttccttctaatcgagatacacacatcgtcggtaaattgccgaagaattaccgcattctgcaatccatacccacttgcgggtagatttaacagtagccatccactagcacgcatcccctgaaaactggactattgcaggacccaggaaaaaatttgaacgggctcgattgccataccagcagcacaggggttataagagtacttcatagcctcttcttggctctacccaagtgggccgattcggatttcacattccttgcatacgcgatctctggtacgggaactcccaggatgtttggtcgatctctcacggcagtgctggcgatcgcacttgccatcaatggcggccaagcaagacagccggctcgagatccttccaggcatcacacccaccatgctggatctggaccgattgatacatcaaattatcgatttctaacggacaagaccaaacgtatgctttgttcccatccatcttcttcaatgtcgactgaccaaagtgtaatatttccacagctcatgtggtggagagtctaccggatgttcatttcgagttgggggagatgtactcggggtttatgccgatccgtgaaaatgcgtccttgttttatattttccagccgaagatcggggaaccaagcaacgatctcacaatttggctgaatggtggaccgggatgtagttcgatgcaggggttcttgcaggagaacggccgctttacctggcaacccggcacctacgaaccagtcattaacgagtattcatgggttaacttaaccaatatgttatggtaagtcattagtgaaaccataaacatggcatgtccaaggatgcattgataaattgactgacgtgtttagggtcgaccaaccagttggagttgggttctcaaacggtacaccgactgctactagcgaggaggacatcgcggccgatttcgtccagtttttcgaggagtttcaagaatcatatgatatcaagaactttcgaatcttcttaactggtgaaagttatgctggccggtatgtgccctatatatccgccgcgatgctcgacaagaacgataccgagcacttcaatctcagcggtaagacccgaacttgcattatattggtcccacattctcatccatactaggagctctgatgtatgatgcgtgcatcggccaatgggattacatccaggctgtactcccctcttacccctttgttgaacaacatgctgagctgttcaactttaaccaatcatttatgggggagctgcaagatacctacgaacaatgcggttacaaggaatatttcgaggagtatttcacttatccggcctctggagtgcagccccccaaagaaatggtctacgacgagtgcgacatctacaacatgatctactacgaagcttttactccgaacccatgctggagtccctacaagatcacccaaacatgtccactcttatgggatgtcctgggcttccccacagaccttgcctaccaaccgggtcctgcaacctatttcaaccgcacggatgtgaagaaggctctgcatgtccctcaagatatcgactgggagctctgcagcgttgacggtgtctttgtgagcgacaaccccggacccgagcaacaatacgacgagtctgtgaatcccacggaacacgtcctgccacggctgattgaggcgaccaaccgggttctgatctcgaacggagattgggattatcttatcatcacgaatggaaccttgctggcgatccagaacatgacctggaatggcgagctcggcttccagaatcgtccttccacccccattaatattgacatgcccgacttgcaatacgcggcggtgtttgatgcacagcagggatatagcgacttggatggcccgcagggtttaatgggggttcaacactatgagcgtggtctgatgtttgcggaaaccttccaagcgggtcaccgacagccccaggatcaaggccgaatgtcttatcgccatgttcagtggttgctgggtgatgatgtgcatctttgatacccgctcgtgacgaggcaatatctggtgctgaggtgcaaactaagccgatgcggcgcggtggtctcacagtaggaggctgcgtggatgcagactcagatcgagatactgatgagatatccctggtgcgggtttcccgatcaggcgaaacctaaattatgtctacctattcgaattcgcgactattacatttaagagacaaccaaccagaacattttcggaagcatatttgtgtataataatgacacgtccgacctcggaagctactgtattttgcctttttaggacagcgggaattggaaagattgcaccactagttagtgttgtacatatattatattcaactcaaacacgtcccaagtatgacatatattaatgaagcacctttgatgctaggcgaagttgttcaatacaccatagtcaaaacgcagatatatcgagactcccacttgtgagcattggccaattaaaccatggaacgcatggccattttaggtgatattggtgcacgtgatctcgcgtttcccgccaactaggacttttatcaacctctactccaacatatagcactatggagcctcgacatggcaggctccttgtcaataccactgcaagcctcatcattaaaacgaaaacgaagtcaagaaggcgatcgcggcctcgagtctaatgtgcctccacccttagacgcgtcgccccaagaccctgccgatcaaccaccctcgactacagctggtcctccgcccaatgaatccgacgtacagataggcggatctatcaaaagtgcagccgtcaaaaaggcagtcaaagggaagaagcctccctcgaagccaccgaagccctcgaagcgaactccatctgcgccattgccagatgcctttaagcgcctctcgcaaacccatcgcgccttgaatctcgtgtacacgttttgttgcacgcggaagcactttgccaccacttttgacaacataaagaaagcagtgcaagctcaacttggtcaagggcgagaactcactcccgaggatgtcgcacgtgtgaaagtcatagttcccggagcggtccggttcgaatatgtggatgaagccaagttggaagtaatgactgttggagatgaagagatagctcagtatgggttacacaagcggtctaatctggcatttgcggcagacatggacacagccgaagacgccagtagtgacgatcttcaccatgcagacgactcgaagcaagttctgttatttgaattcgtcgacggtgatctgaagcgggaagtactgaacacgaagactggggaacctatgaaagctatgcgtcgcatgaaagacgacgatctgaaaatgcccgtctacagccaaaagcagatgctgggtttgattgaaaaacggaattccaagttctcagacgctttggatgcatttttggttcaatgcgaggacaacaatactgatccagtggatgctcttgaacaagagaagaatgttttcctgcccatccctccaagcagcggggcacatacccctcttgcggcgaagccaccagcaacgattcccaaggagcgaaagtccattgcggaaatccttgcagagattcgggagatggattggtatcatgcacagattgtgccggaaggccatcgagtgttcgaagcccaatctcctgtgtacggagatctgacattccagctctcgcaggaccttgtcaatgctctgtataacacaaaaggaatcactcagatgtatgctcatcaaacagaggcaattaaccacctgtatgagggccacaatgtgattgtatcgacgtcgacaagctcaggaaaatcccttatatatcaagtccccatgctgcacgagctggaaaaagatccggagagcagggggatgtatatcttccccactaaagctctggcgcaagatcagcgccgcagcatgatggatctacttcagtatatgaacgggctgcaaaacacaatggttgaaacgtttgacggggacacgccaatggggagccggaactcgattcgtgacgaggcgcggatcattttcaccaatcctgacatgcttcatattacaattttgccacaggagagttcctggcgcacctttttgaaaaatttgaagtttgttgttgtcgacgaactacacgtctataacggcttgtttggatctcatgtcgcttttatcatgcgccgtctccggagaatctgtgctgcagtgggtaatcgtcatgtcaaattcatatcttgctctgctactgttgcaaacccggaggatcacatgaagtctgtctttggggtgcaggatgtaaaactcgtcgatttcgatggatccccctctggtcgtaaggagtttgtctgctggaatacgccattcaaagaccccaaagatcctacctctgggcgtgctgacactgtcactgagactgcgaggctgttttgccagttgatcctcagaggcgtgagagtcattgccttctgccgaatcaggaagctatgtgaaattctcttacaaggcgtgcgcgccgagtttgatagactcgaccgaaccgagattggcaagctggtgatgggctaccgaggcgggtatagccctcaagatcgacgtcaaatcgaaaaggaaatgttcgaggggaaattgatgggaatcgtggctaccaacgctctggaactgggcgttgatattggctccctggatgcagtcatcacaatggggttcccctactcgatttccaatctacgccaacaaagcggccgcgctggtcgacgtaacaaggactccctatccgtcctagtcggggatagataccccaccgaccaacactacatgcagaatccagatgaaatattcacacgaccgaattgcgagctgcagatcgacctttccaacgagctcatcctcgaaggtcacgtccaatgtgccgcatttgagatgcctatccgcccagaagaagacagcatatacttcggacaacagctccttgccctagccccaacacgtctcaccaaagatgcactcggcttctaccactgccacccacgattccgcccgcagccctcccgcagcgtctcaatccgcgacacagaagaccaacacttcgccgtcatagacacaaccaacaaccgcaacatagtcctagaagaagtcgaagcctcgcgcgccttcttcacgatctacgaaggcgggatcttcctccaccaaggcacaacctacctggtcaaagaactaaacaccgactccttcctagcgcgcgtcgtccgcgtccacgtcgactggaacaccatgcaacgcgacttcaccgacatcgaccctatagaaacggaaatgatgcgtccggtgggcaacgacccctccgcctcgcgcgccttcttcggcgcagtccaaatccacgccgtggtctacggctttttcaaaatcgacaagcgcggccgcgtcctcgacgccgtcgccgtcgataacccgccaatcgaccgtcttaccaggggaatgtggctcgatgtcccacctcgcgctatcgacatcctccaatcccaccggctaaacgtagccgcggccatccacgccgctgaacatgccgtcctctccctcctgccctcattcgtcgtctcctcgcccggtgacgtccgcacggaatgcaaagtcgcgaagaaagagctcggtcggccgctgcgccgtgcgaatgtacctgctgaattcgaggagaagcttaaaccgccttcgcggcagagacctgctcggcttaccttctatgatgcgaagggtgggtcgtgtggttctgggattgctagtaaggcgtttgagtttattggattgcttctccggcgggcggttgcgcgcatcgaggcttgttcttgtctttcgccgcagggctgcgtcgagtgtgtttgtgatgagcgatgcaaggagatgaatgttgttatgagtaaggctggcgctggggttatactgcgatgtttgctaggatgggaggtggatgttgatgccttgccgtggggcgaggatgtggagggggatgagttaggagtaggtgcgggagagttggctggtgggttggagactgtcgtcagggccgaggacgtgccgtggaaggctgggtgtcgggttagttgttgagagatactatagttatgtcgtgttggttgataccaagtgctcatttctgacattaaccagtaattgcctgcgactgccttgataaccaggctcagcgtcatggtgagggcagttactgactgttaagaggcagaaggatgtgtagggggttgagagaaattaaaaagaaaaagtcatcgcctggattgaccggcgatcaaaacggcaggcacgggtccaggcgacacggaaggtaggcaaacaccacagcaagcggattgagggataagaaatacaagagtgtcaaaccactagactatggtgtccaccgtacctcaaagggatagggcaagcaacgatctataacacccgcaaagcctcagtcacgggtcatatttttgccaagtctgtcaaatcctggaagagcttttggatggctccgtcatatttgtagcaggaggctgatccagggctttctttcccactcattgaagaaaagagaaggtgcccttggaagtttggacgtataagtacataagggataatgaacggtaccagtcaatgatccataggaatttgggtataataaatgtacatcaagtcatgaccgagaaagacctcctcggggtccagggggaaggaggaataatagtgtgataaggtagataaggcgagtaaggacgtgtatatgtgataatgatggggagagtgattgagacattatatagcgaggacaattcaagaaaaggcgagaagacggcggggaggagtgaggagatggcaagaacagaaaggatgaatgtgtgagtcgatgttcaacggaaatttcttcatctgggacgcggggttttgcgtcgtccagccgcaagattgagtgggattggctgccagggcgttgcctggataaggtaatgagcatgcacgtttcatgcttcgatatgaaaatgtcaagagagtaggtagtaggaacgaggtcccaagagcgaagcggaggttgtacttgtagaccatggtaactcaggcaccgaagatgaatgatgcaaagacgaaaaaagcccccattcactgaagaccactatgaagggctccggtcgtcttcggtttcatccagattcaacttcccgagcagagacctcatatcacggacagcctcgcgcttctcatcgcgtggctgagatgagcgctcatcgcccaaggaacgaatctcgcggacaatgcttgtatacccttcatcgttagggagccaccaatggttgacctctggaacttgccagatggcagcgagcccggtgcggaaactaggcacgatgatgtacctattcgcatagacagctcctggttagctttgctcttgatcatttaactccgaaacgtagatacgccggtgggatcttacccatgttgctctaacaacgctaacgtgcgtcgggtccacatttgatatttatgctccctgggaagaaacatgcccaacatgccaatgctgtttttaaagttgatgcaatacccgttttccttgtgaggccagcgaatcatcgtctcgattaggcgacactgcgccttggccaattcctgcaagtcctgaagcaaaggctgctgcaagacttgcatggtttggaacttgtacattgtctcggcggcgagaacgtcgatccaagcataattgatatcccacaagggacctcgatgcaagacacctggcacatatggatcgacaacatcatcttcggtcaagggctgcttattcgggtagtgttgcactttgtattcgtaatcatcgaatcctctgagaatcgtcttggcctgctcgagccattggcccaggtgttcattctggatggcaaattgctccattgatatcatgccgcgagacaacttcgcatagagggaagccatatccaagccgaagcgtcggttgattgatgccacaagggcgagttgtttggatggatcatcaggatatatgacggcttgctcggcatcatactgctcctttgcaaggtaccagtctcgaccgaggactgtttcggtaccggccaggatccccacgaccacatcgaagcgcgagtaccataagaagatatttgtatgtagctcgttcacgttggcggactctggtgtgactagctctcggataaaagcatgtgccgcctggtggtgatcgatcatgttcatccagtcgccgatgtattcctaacagtaaaccaaaatgagaaaaaggccgctgcaatagttatggaaagagcgacatacctcgaatgttgtcaagacaagaacagtacacagtgtagcctcactgtgctcctctccagaacccaatgatttccggaggagaatcaaggctttattatagtgctgcaaaaatctatagagctttccaccagggctgtgtaaagaataatgataggccgaaaagcccaccagggcgtagaggagcggctcatagtgcaaggcaagttcgacaaggctgtagtggatgaaatgggaggaactctgtctcaagaagaaatgcgggggagtcataaaatcctggtggaaattcaaataaaatcgcaaatcgtccggcaggcgcgcgttgttgatcaattctgttgtggaatgtcccaggctgcccgagcgcacgctcaatgactcaaagcgcggcgactcagttgatggcgaactactatgctcttttccgtaagaactaggttcagaagtgggccctgcattatgtttccgaagagattgggcgctctggctcttgcgcaggtccggctgtgatgtagttgtggcgcttgctggtgacggtcgggaatcggatacagaactgtcgggttcctcttcgtcgatgatgggctgcaaggggctgagagtgtcggagtctaccttcgcggacgaatcgctgccgtgagactgctggcgaccagcgcgcgacttggcggtagagcgtgagctagccttggatgcggacgacgatgcggtaagtgacggatagacacaatcgcggctccctttcctacaccgttcacagagtggacgggtctcatcacactttatccggcgagaacggcaggtgaagcagccgctccgggtgcgcttatgcttcttctggtccgagagaggttggaacagggcttgtttctgagaggttgtatatgaaggaggcactatcatcgtcggtgtcgcggagggatcgtgccagaacgcaacactctcaggatactgtgttggtccaaacaaggaatatgaagatgagcttggatcctgtttcattgagtccataaagcccgacatggccgcctggggcgactgacgtgaatgcgtcattgtcacgggtatcacaaaacccaactaaaatccccttggttcctcgattccctttccttgaatcccttagtcccatccaagtcaacaagatcgagtcattcttaatatcaaagagagctagaagagaggtgaagttggtgggggttggatatgacccaaactaatggaaccggggacgtgcggagattaaaaaaggaagaagagaagacttgacttctccgtataaaatgaccaaatgaccatttcgaacgtattcatttatttctttatttctttttcaatatatcccatgaataattctattttagtcgcatccagactataagctaaagcgcgatctgcgtccggttcatgtatctaatacgatagatacgaaggtacaacgctatatcccggacctccaacaaagaatagtagatgggaatctgggaatatggaatatgtggatacatgggctgatccaggagagctccggctaaatcaaaacatatttctttggcgccacatatggggcttggtctatacaacatagtaggcattgcccttcaagcttatatacagtcatttttttagacattcattctaattattcgttccccttgaacctacggaaaaattccaagtgatacttgcttctggatacaccgacttggtatgagttctttgtactccgtactttgtacatcattacttgtcctagcccctgttcaacgaagatcaggaacaccttgaatatcattttagtcaagagcagaacacaaggcagagatctccacggacgaagttcggatctcggcgtatcagaaaaatgacagaggggaagaaaagaagagaaaaaaaagggggggcgagaacgacgatcccaagccacggggagtcagtcttagggcttggctgggtctaatatgcagaggatcatgattcatagcgtctatgcatctgttccggttccccgagccattttcggtttatggtaataggggagattagccagtgagtgactggtatatatgtgtcctaaaatttcttgcttttttaataggagacggaggagacggaaccccggggatttttgtcgatgtctttttttttttgcctttttgccttgcatatatattgccagtggatcgaaggcaaaagcgacaagggtcctggatgacgcgattatccgttaagctccgacaagattagactcctaacttgtgctccatacggagtagtatgtatgtacataaattatgcttgacggcgagtcccgcaataaaaaaaaaggttagactcggcaattctgaaaccttgagcacgcaaatagaaaaaaatgccgaaaacgttctgttgacggagatcggttcgaagtggaggcggttagaggagattgtgggagtctggaggttctcattcgaggattgaagaagcaatagtttgctaaatgtgggggtttttcgttgtccttccattttcctaactggttctagtcaaaacaccgcgcaagatgcagctgtaagctgttagttcaccatttccgcctcgtttgacttcccaattccggctatgatatgtccggggattttcaaccggcactttgactgatcgacgatgcattgacagagagggtgggcctagtacggagtagatcgaaagagagagaaaaaagactaacgcccttcgaacccttggatcaactccaatatcggctcaagtatctcaattcagatgaatcagtccgggacgcttcatgatccctactttgacttgcaatattagtaaagatggaaatatcagggtaatggggcggaataggaattgtatggatatgcacgatgtagattgcaaccccatccaacgcccgaaaatgatacccagacagtacaacatacagatattccagggttccaaagctctggccacattcatcccctaaatatctgggccgtgcacgagcatttcatctccatgtgggtgagagataatccgggctaagaccacgctaggtgacctccatgacacccatgtgcgtaccactgtgaggctccgtaagaggaattttctatttggctttctttttgactatcttttggctcgcaacttctttacatatcctccgtacgaaatactgtacatcatgcatcaagcaatctaggtaatacatatctgcgaaattgtcatataacatacaacatacaagatagatccatggcataagttacctaggtaaatatctgcgtccccaccccctttgccactatgcccgattcggtatcatttcgagagcaacaaagttccagggaccgctgacagtgagatcagcaggcaaaacgtggttccctggtggattcattggagatcatacaatatatgttgtatactgacttgcaaggtgcgaacatgaaggacttttatactcctaacgctctaacgctttctatcttttagtcctgttgatttggtctccaacagagagtgctgcataatatagacggttaaattatcggtttatattgtgcgccacgaagaaaagcgtgtccttaatctggtggaaacatgcaaaatcatatcggcccgggagcttacaaccgaagtcttctattggctaccacagcggtttaatatgtgcaaagtacaaagtactgacacataattgtggttttttcccttttatgatagccctcctggttctggattggccactagtaggtggatataaagtggctgaaatgagaatttatacagaaccaaaaggcccgttccattctcggtagtcggagcttattaccccgacttccagtgtaaaacggtatcaagtaatgatcttcctatatacctagtaccttctgaattatatgttatacgttgtacaatggttcagttgtgatctatcaagactcgagaaacaagcaaacaacaccactaccagagctctcaaactgggccaaggcagatcccagcccgcacccaatatagttatgtggtatgctattcgccgatctcaaatgacgggacaccatctaattgagttgacgccggtgaattcggggaccaaaagcaacccacataatccaccatcaagcccaacctccgagggaaaggggaatggtggagccatcagagaagcaggacgttgggaattggctgtgatctctcacatttacgccacgatcataggcccaacggccagtttagcgttgcaacgctctgatcgcccactttctggtttgggttgcactgcatggcacctttcctctttcgctatgattttccctcgactttcggagttctctctagactacttgcctgagctgaggtttgcagtctctcctatctacatagacaaggggtggtcatacatgtgtgtcgcgtgacctgcgtctaggaatggaattccagaggatacccacatatgtaggtggcatttcccttattggagaagggaagggctaaagtgcagctaaatcagccgtgcagccctagcatgtgatgataattcgaccggtgaaatgcttgcaatttcatatccagttctgcttgcggggccatttgagctaggatcctccgtttctcatttccactataattaccatgagacagacatgattgcccacatgggtcacaaagtatgtctgaatgttggatcagtagtcttggcacgttcctggcttctctctggcgggaagcccatgccggccgcggctctgatctccaagttgggttccaaagcgcgtgaaatgtacacgagcatgcgatatgatcatatgtgtggtttttgtttgctgcaatcatacaagatatacggagtatatagtcataaatcgtcaacagccccgacaatggcatcattcgggatttgtagtcctgggtcgatcatttgtcacaacaagtgcagatcgagaaccgcggcgtcccttcgtccactatgcggaattacgccatccaagacaaatgggcatttatgcacttgaggctttttgtttctgcgccatcaattccttcaacactttatccactccttcaacaacaaccccccactcggtttcatggacccgagtttcaaaggcctcgaggttctcgtcctggccctttcggaaagggatctcccgcaccagaattggtgtgcccatatccacctccgagatgacatcgtgcatcataacaccggtcttgtcaatttggccctccaaccacgcagcatgagcacgttcaatcgcattctaatgatcagaaaaagacatatcagcatacaatcctagctaacaaggtacgatcccaaaaaaaggaactctatgacttacaacgccattgaacgcccccggcaaggcggggtgcaagttaataatcctcgtcttagctgcttcgagaggctccaagaactgcggcgagagaatgtgcatgaagccgagacacacgactagctccggcgcgtcggcaaggatcagcctcgcgagctcggcatcgtattcctcgcgcgcagcttgaacaccctccggcgtcgcggggtgctgcttcttgtacttgacaaggttgtggtattcggttgggatgttggccttgcttgcgcgctcgagaccgaatgcggtcttgcggttggagattacgcggacgattgttgcgtttaactgacctgcggtcactttgtcgatcacagcttgtaggtttgagccattgccggagatgaggactgtgacacgaattggggaggtcatggcggattataggtccccggtgggttgtatggtgggggttttcgtgaaattgcagaactcggaggttgaaagggtaggaagcacggttgaactttcttcgattgcagtgaggtcaattgagtattgcctttgatagtgagactgcagatgttcctccccagcttagagaataaacgaaatagcacaagaccactgcaagctagtccgcgggcaatagagttgggtgattttttggattacctaagtcggccgcggggccccggggcaagaccggcctcggagccctggagaggactgtaattagatgagatactaccatgtatacgaggaacatcaagaagcaataatcatgataacaaaattatccaaggctggctgcatagcattatgttgtttgtacaagtatctcaatatgtgaaacattccctggccagatagagccatgagtatggctagagtgtaaatctacgacaacacaccgaacaaaggaaaaccaagaattaatagacgaaaagactaacattcccgggactcgaagtcttgagttgcgttccaagacagagttccttgtttctaggccccgagaacgaatattcaataaccgaacatgataaaagcacccaaagtcgatgcacagcaatgaaatgcaaaggggatatccatggaaaaaaaatcgttaaaggttctaagcacacgctgcatgctaaagctaaaatggagaagaattcaaaagtcaaagtcgggggttgctcacatggctggttttgaccatgcttgctaggagctagaagggatcatacggctgtgccatctagaccaggagtaggcgcgggtgcaggattgggcggcgagttatgggtgttggagtcgtttctgggagtttcgttgacaccctggcctcggcaaagaggacaagagtttctcccggtggttaaccactacgacataacggtcagcaaatcgaacagattcaagtaaaatgggcaaagggcaacaaacctggtctatgcagtccttgtggaagacatgcttgcatttacccagctctcgaacttcctcggccacttcataatcactcaagcagatcaaacaacgctccccgtcctgaatttgaatggcgccagcgccttccaccgcttcggcgaccaatgaacccgcatactcgacaaggcggaatagtccaccggcggagttgacgtcggtttgggaggcgacggggggtttggctggacccaacagtgatgagagtaggatcatatcctcgtaggtcgggttctgtttaaacattagcaaccaggttcctgacaaagaccagtagggcattcttacatcggtgaaaaggcttggtgtggtcagagccgggtgattttcggagaggttggttccaacaacatagattaaccaactgcgacctccgcttggtggaggttgatcgggctcaaccatgccattgcgtcgaacagcgccggagccgagggcccgatgacgagcatactcagaatcgcttcggcgccgctgacgagcggtattgaatgtcgccggctcttccaaagtctcagccgtcggttgcatttcccggccttcatagagatgaggtagagtatctggagcaattgctgaagcagaggatggtctacggctcggagtcgaagtgccggaggataaagcagacatcccctgttcagctggggttgatggaggtgggtgcggtcccggggggctctcggagaaaccagaaggatgatgggatgggaatgcagcacggggcccagtgtcagacattcttctaaaggcattggggaccgacgggcgtggaaattctgcagcttcggccggggcgtgtactcctgcatggcctggctgccgaggaagattcaatctagatcgcacgtcgcctcgctggctagtttcaccagtggcatcttgaggccgtgggatagtattaggtggcaaaaatggtaggccgagcagggcatctagaccgggggccggacttggaggctgttggtgcccagtatgacctccgtttccagcgggcacggaccgaactccaacaacgaccagtgtaactgttcgtccttcaccttcggcaggttcgtcaatgtccattccatccgtttcggtcccacgttcgccgacaccattcgcgctctgccctgaagcgcctgggcccgttggagattccgaattggcaaaccggaatacgcgcaagaaattgacgggatgtgagggtgcttcgtttgcagtattgctcggcccttctcctgttgtaggcggctgagcctgtgcagaagttgcatgctgcaaactctggatgaagttctccaaagagccatctatcccatcattgcccaatgcctggatattaggcaacgctgggccggcagtgccggataactgagctgcaattgcggacgcggcaagctgaagaacccttgacagaggagtttgctcctctcgtcgaaggactctggatgatctcgctcggataatcccgggcaaccggcgcatcaaagcgggacttggctgggcggaagatgaagcagttgctggtctctcagcctggatggctggctctacggaatccagctcgtgagggggctcgccgaagtccagacgcgtgtccatagccctatcatcaaataagggatctgacatttgtaattccgggctttcgtgcggccgcaaatccgagtgtggctggccgaacatgtgagaaatgggagatgaaatcgaatggcgcatgcgttgtagcctgacactacggcgccaggatgctcttgtgggctcgggtgtttgagagggagagtcgatgaatggcgggtttgctggtgcatctggaattccagcggactccgcgcggggtggaataaaatatggcgcacgaccagatcggcgccgagtaattcctctagggctaagtgagttgaacgcactaaaccgaccggatgtgtgggcagtctcagatcttggaatgggcataggaactaggccatgtcgatgtgcatgtccctccgccggagtctcttcttgactgttgagaagtccacgaatgactgaatttggaagaagcctagatcccagccttgacatggtcgattgtcttcgtgctgccattcgagcaaatgccgcagtgcggtattcgcggggtgggaattcatattcgggcgcgccctcctcttcgatgctccgcatgggttgcgagccctgggggagcgaccagcttggccgatcggatgccatatcttggtcgcccccggtgtgtgtgttcatttctgttcggggtggcaaaccgctctctccgttgtgttcagccgcctgtctataattcatgttttcatcccttgtgttagggccacgctgtgtcgggaaaggtgcaaggtgtgtcgagtagccagagttggatagatcacgttgcgtagaagaggactgtcccatagtaacagagttgtggccgtcggagtgatgcagagtgtcaatgactattcatcgccacgcgagaaccatatggctggtagcggcgaccgtatcgatatttggttgaacctatgagatggatatgacaagtaaaagtacctgagtgatatatgaaacaggtattgattccttgctcaagctgacaagatcgatgcagtcgattctcgggtgttggttcagaagaagccgtatgtgccggagctttggaacaaaggagtggagagcagacagggagttggcggttaccgggttatttgcgacaggtacaaaatgtgtaagacaatttcactgcccaatacgagcaacagcggccagaggtctcaaactgtctgacgagtccaggcacagcccacactccgagtggtataaccgccgagccttgaatctcggggatctaggtaaccacgctcgggaaagaacagccagcaagtggcaaaagcgaaaggaggtaaaggagcgctgggcaaaatgaaaagggggaactagaggaaaaggaaaaggaaaaggaggagtagaggagtcatatcaaagcaggcaattgatagaaggacgataagtgatgatgtttgcctcgtttgcttcgacttttatgcctgaggcaccatatcttcattccgtcatgttccaaggttccaccacccgtcttctgacaaatgcgcaaaccatcaattggggcaatcatagcctaggccctagtacggactttactacggctctaaatttcttcgggcgcatggaatatgccccatcttgggcatatggctacgccgtcgtcttcggttttttctctgccattaccgccttggctccagccgcctagcactcgcgtatctcaatatgaccgccggaaacgcaaaaagagtgtcgggtggagtgaaagcgatctggatggcgaagaaacgactgatatcgcctcagctacggaatctgagcccgctgggccccccttagtattgacgccgaatgaatcccatcagtaccgagttgcaggtttcccattccaccaagaattgccgaaaggccatttcccccatgaagcagataaggaggagcaattgagaagagagactacctcacgtcgcctcaaagacttggcggcattatcacctccaatctatcctcctcagtcggcccagcaaggcaacattcgcttccaacatctgggtgcgttgacagcgatcttacatcgatgtatgctccaaggtgattatgtccgagctggacgagcctggggcttgatcttgcgcgaagattacagaggctttcagatggatgtccgcaacgaagcaaggtggggcattggtgctgaaatcttgctacggcgtgacgaacagaaaacttcagccaatcctggtaccaccaaggtgccgaatccgatggaaagcacacccataaattttaccaccaagggttttgcagcagccaaagaatattatgaccgccttattctcaaccatccgttcacgaaatcttcgccacagtcgatttcctctttgcacttctaccctgcgatgtttgggctttgggtgtatatcactcaggaagaaagcaagatgactaggaagaatatttctcttcgccaagaagaagagcctgaggagttttctgaggacgaaaactcagaatccgaatttggccaccgtcggaagtcactaaacaagacagatgctgccatcacagcaaccagggcattggaattggaaaaggcgcagcagattgctgcgcgtatggaccagctcctgggatctcctccatactccgactctcctgaattgctggagctcagaggcatgatctgtttgtggatcggagatctgttactatctgcgctatcattacctgtggactttgaagagaacgacgaccctgaccggatgctcatggatgaaacccccagctccctcgaagcgagacgtgagtacagactggcaactgaaaagaaagcagtcgaagtccaaaggtcgattgagctcttcgagaaggccaagaaacgaggcaggagtgtggcatacaatatggagagccttcatattgatgatgactctgctgattgaggtccttgttgagatgatctcgatgtcttttcccatgggttgtcatgtaaacggcggacctatggattactatatgcggttttgacctttcgggtttagcaacccgatacgccgtcacgtaacctcccttcaacgccctccgacataaaagacccgtctgcgctggctgctctcctcccttcctctcaatttttcattattctgcctctctatcttgcactcatcgccgccccatgtcttttactctcgcccccaccgactactgcgcatttgctttcaacccgacgcactgcccccccccttcttttttttaccagagataccgcatgatccgatatccagcttgccatgcctgtcacccggaagcgtaaccaccaggatgatacagcatcctgttctttcgtgtcgcaaatcctactccttctctagggcggtgactgagcaccatgctacgaagatatatgggtctcccttttttgtctctgattccgcgggcctccttcaaatccgcgaagtgccggtatactctcgacggtatatccctctccggccgccccacctgaggttgcattgcatagcccctgtttcacagaatggctccctattgcctggccaagcgcatagctgtcgtcatcgtcggtctctcctgaccttctccacccggtcggtgaaaactcgaaatcacagtcggatagacccgcgccagcccatgcgtttctacctagccagcacaggcgtccgagtctttcattctcggggcatgcgccgtacctccaaggtcaattccatgaatttagtgaggctgagacgttattagcctcaatgagcttgcggaagaagtgaccgttgactgctcgaatgaatttgacatggatttcttgaatgcgtcttctggaagagattgccatacttgcttttgaaatttgatacttcgacatgttatgggatcgtccaggagccctgcaatggaggaccttttctactttatcaaataagcatagtttattcgcatcaaaagttagatatccccgggaggcatgctgtcatcctcatcgtctttatacggccagtttcgccaagttaactcccgctcgtccacttctgcttgccgaaccatttccatacgaaactgtcgattgccctccgccgccctctcaaagttttctggctcggtaccgccttccaggtctatatcgaaatggtctctaacctgggacaatagctgttcagactcattccattcctgcgattccaccatggcagcctctcgttcttcgtcgctgaacacaaccggacaagcggccgaggagatgctgctccataccgatggagtcgtgatacctactaacgcagcacgtaagttgattaagtctgcgtcccagggataccctgtctggcgaaggagatactgccgcattccgagatgaggaagtctcaacaaattcatgtgttcctcattgtatacgcctgtcgcggctgtgtagtaaaggttggcctcttcccagcgaaagacggttctgcattgtctctgttgttcgattcccatcttatcgaaatcatcgggaagagatggaatatgcatactttgaggtcgggaggaatcatgctcacagaatgcgggataacccacttgcatgaagcgggggaataccacagcatcctgccaatcgatgatactgatgattttggttgatccaggtgccaacaaaatgttgcttagactcaaatcagggtgtctcagcgtcggaacgctgtaagaacctggccgggttatatgaggcactaattgtaggaatcgcgtaagtaacgaggtgtgctcagagggaagaatgttatgattagtcggtaaaagaaaagtttggcgaggctgagctttggcgtggtgctgaatgacagccatctctcggcgagccgcggacgtgacacagtccttaggtgaaagccctgacaacaatcagtcccggtcatagggataacagaggggaaagggggaaagggaggaacgtacagggtccacggtcaatttcggttttgcttcgttcgccatgccaaaactgccgagcagacacagggccgatacagaaatcctccacgattggtatctgggtttccccggcaaggtccttcttgtgatataagcttccatatgcaggaaaatggaagtcaaaaatcttcctctctatatctgcgatctgtgtcatgatatcttttgtctcgtcggtagtgagagataaccaccgtgaagaaagactctcccccttcactcgctccatcagaatatactctgctccgatggcattattcaatgttgttgagtaagctaagacctctggtacaggaagtttaaggacagatcgtaagaagttcatggtggccacctcactggcggttgtataatgaggaggcccggcaatgggagtcggaattcgcgcgatcacttcacggccattctttgctcgcagaagaaacactttgttgaagcctccctctgcaaacttagtaataccagggcaatagacttgttttactgcttcgccggcgatccgttggagctctgttggtcgaaacttgacgtatcgttcgttcaagcggtcggtctcgttgaatctagctggaagtcagtggttacgatcaaagcaataatagtcttcacctacatccatcgtcgcgatgtatttcgaaagtattcctcgcggaatgctggtgggctggtggataagtgatggcgggaggaagcactggaacagatcaacggtctccgcaaacagggagcggatgatacacttggactaatggcgagtctccggaaaaacttcaccattgttcagaaacaatagtagtaaaaaaaacattcagtcacgtagatgttgcctgatgcaggttcacttatcaattgagcaaggtgagagcttgccaggaaacagctatgttgtacacgataaggtttgtagttggacctgtgaattactagatatggttagttttgccatttggggtttagtgccccaatacgccgtcacgtaacttcccttcaacgccctccgacataaaagacccgtcttcgctgctctcctccctttctctcaatttttcattattctgcctctctatcttgcactcgtcgccgccccatttcttataatctggcccccaccgactactgcagccccactcactctgcactgtccccttcgtttttttaccagagatgccgcatgatccgatatccagcttgcaatgcccgtcacccggaagcttcaataagcgggttctaccagtttgggactagtgtcacactaaacctacactaaatatgcaatagaaaaaaatagaaaagagggaagagagctctctgcctaataattggcctggagacgtgaatttccagagacttgtgaagttgtctgttcccctgttcatttttgccgccgctgcctgccgtatgtacctacctaggtaggtatgacctcgggatttgtatcaacttagtcatcgttcttttcctccagggcttgtagccactaacaaataatactactcttcttattatctctcagcgcagaaatcttaccttgctttcgctttctcgtcaaagggagcccggagccctagagagtaaggctgattaacactcatttctgcggataacaaatcgagcctcttattatcattgttctcaatcttgaaacgccacgcgcgcagccaaaatgtccattgcagctctgcccgtggaattgatctcaaagatatgtaaccagttggatttccagcaattggtcgccctgaggttatcgtgccgcgctttgtacagaaactcactggagaatttcgcggagaccttttaccgaaaaatccgtttcattatgacaagcgaaagtctccatgaattggaagaactatccaagtcaaatggtctccgcgagcatgtccaagagctatggatgataccaactgtgttcaatggtactgaaatgcccctcggcatggtatctatatcatcaaaaagctgccgacaagtcaatggcgatgagctggaaagccggcatgctatccacaaagccatgcttgcggataattccaacctgctagaatcagaagcgttcagtgttcgacttcgggaatgcatggatcgatttcagaacctccaaacaataggactcgcacattacagaacagaatttttgcttgatccacggcagcagacagttccattcttgggaaggcgacagatgatgagccggattgattttcgattcgatgtttacagcctggaacattttacacataccggtcagcatagccagataaggaaactgaactccttggcattgtcgaagctttttcttgcgttatgtggctcaagctgcagaccccgaaagctgtatacctgcgattccaatttctgtggtgatatcggccccaggattgccctctccgaagaacaatttgactctctactctctactttgaaaggcctagaggatcttcatttatgtattgatctcaatgaggcggcttggctgaaatttctcacgaaacttgcacctcaactggaggggctggttctgtcgcaagatcatatgcctgcctatccggcaaaaagctacgttggaaacatgttccataacattagcttcactcgactccgagagcttcatattcacgagctcgatatctatttcaactctttggaatcactattgcatagtgtaaagaaaactctggtcactcttacacttgaacgggtgacaatacgcagcgaggagttgagagctgcagaaaaacctaggtcgcaacataccaacacaccttgcggcgctggattctctctgacatcaccagcgtctcagttcacttcgccatcgtatgtaccaacttcgccgtatgtaccaacttcgccgtttgtaccaacttcgccgtatgtaccaacttcgccgtatgtaccaactccgccgtatgtaccaactgcgccatttttttcaccatcaccattgtccacaccgaccgtagcttcgccggaatatggaccagcccccctaccagtacggccagtatctgaaacagcatgggcagaaagtgcaccccaatccccacagcattcctcgacctccgaatcctctgagtcgacgacagaagaatatccaagcgcaaagtggctatccacttatcacccatattctccacctgaatttgctcgaggctcagtctgtccgatgtgggaaacccaaatggcatggagacgcaacgaagaaaaggtgacttgtctgtctagccttttggacattttacagaacgagctatctctagaaacactcttattggaggatattatctgtgacggcaattattattatttcgaaagagtcaatggaaacggacaaagcggccgagtggattttgacattcgcaaggctaatctttcgttgaaagaatggatttcccgtttgaggccaatttctcactgcccgggttatcgcattctagacctcaaggaaaacaaaggttagtagtgcctccctatttagtcattgcggttactgatggaatctagaaatagaggactggttcgacaaaatgataggaaaggacagcgggtcattcaataggttggactgtgactgcaaaaggaagaagaagccgttgtggggatgtccttttggatgtcaccgatattagaaaaagggaattgatagagggacaccccctttggatactgggaaccccccccggcagcaagaggaaccaggctgtgtcggaaagccgggtttttacgaccgagttatgatagagagcaaaattgagccttcaatagcagatgtagagcaagtgcctcaggtggcttcgaagcattgtgcattgtcgtcccgaacggtttatatggtttagttatacatacgctatagcctaaggcataagcttcctagggagcgaccggaaacggaaaaggggttttattagataggaggcgagggcttctttatgatataattacactatacatccatattgcccagctagtactatctaacagaaaccatacgatccttacagaatctcagtttggaataatcggcacgtgactacgcggcgatatcgcgtttgcccaacaaccttaccgtgtgactgatcctgccgtctttcgggtgtcatcaagaaaagagaacacatttattcatttcccctaagatagccagcttcacaatatcatgggggttggcgattatgtccactccaaagaaggtgggcaggctcgcggagcccccgaccaagccacccagtcgcgccagcaacgtgcagaacaggccagagtcgaggtacctgtcacccagctagtcgacccagcccctccaggtgccaatggtagagctgggtcgctagaatttcgtggtgcatcccaattcccaaatcagccccgcagtctccctacgcatgggatgcagcgggagagcatgtttgatacagacgtggaggcgattgatgattcaactgtggcagggactagtgtctacggatttgacgacaacaaatctcaggcagcgtcaagtactaatgctgcctacaccaacccggatccacaaccaatgtaccagccgcagccttcacggcatacttacgggtctaactggtacgaaggcctgggcgaccaagctatgaaaaaggccggttttgattcggatgacttcgatgactttggaagccaaatgacttcatctcttggcggagatggcggggataatgaaaagcccgacgaagcacccaactggaatgtgtcgcacaaaccgcgtacgaccggggaaccattgagcaagcgcctggagaatttctggtccgccagcagaaagagaacttcatcgcggcagtctgtcaatgtagactctgaccccgagcctcagactcaaccacaacccaagtctaagccgcgtaaattaggtcaaatgcttcctcctacggggcccaggaagattgttctccctcacaccacgtcagcaacacccaggacacgtttcagtcctccaaagccttcgctccttgaacagctcgaccaacaactcgacgcatcacctactcgccataactctcaacctccgccagatgttggccggacactcagcattacatcgttccaggaacataccgacagcgatggtggaagcgacgatggcatggaccgcaccatacgagcggatggacgacgggaaagcggcgggcattcaatcaatgcctttgatatgaccagtttgaccgacctagacgtcgatcacaccattcaagatcctttttttgtgcaagattcccacgaaccagaagagccgctgcatcgtagccgccgcaacactgccatccgttccaaaaagcgatcccttgaagcagattacccaccggaagtgctctaccaaaagtctttttccgagctccaagctgagccctttgacaaatcacccacccctcctccaccaatcgccaaatcaccttcgttgccaccaaatccaccacctttcccggaccctcaggagcccaagaatgccgtctcccacctgttgaccctgacagaccaagaacgccagaattacttgtcccacatgactatggatgaatgggaagactgcggagatcaaatgatcgagcgtttcacccatcttctttcggaaatgaagaacctacggcgtgctcgccgccgcacagctgctgtgtttgaaggcgaagtcaagcgccgccatgaccaagttgaaacgcaaagttcggagttgacgaataaattgactgagatgagaaccggcggtgcagaggttctgcgtggacgccactcatgagtaaggaatgatcttttgctcagcctggcttttcattgacccctatgttgtttgagatgatcgtgttatgccccaaattacccacagcgggacttgatttattcatgttcaataccccttttacgctttcaagtttcttgttgctattgtttatttcctggggtcctacgtggggtcttatcgagttcgcattcataatttggtctgaatggttgttgtttttttccctgctaaaatgatgtatgatatggacaatgcgtagctcactcgccaaagctatgctatctaacctatggtttattcgcccaaatgaaatggaataccagatataataacgccatcgacccataatgcaagaataccccatctcccactgcaatcgttgagagggagatgagactaaatagtgtaatagaagcttggaaacttatcgagcctcggcaccgggtttataaagcgcggcagcgagtctcttatagtcctccagtagaacagctacatccccaatacggagttcgcatgcatcctgtgtctcaaggaagcgctggattggaggatcaattttcaacgaagggttggggagcgggctgacaggaccactagtgccgtctgtcgaggcgggtgacggcttgagtctgtccagtcccgatggagatacagacctgccgctgggagtctccggtgcgttgcggccaaagttcttcatcatgcccgggatatggttcagagggttgagcgtgttgccgaagtttcgcattgattctaacggcgtggggctaatgggtgaactcgatgcaaaatcttcccgcagtgatgccgtgatggactttttactactcccttgggttcgggtgctatccacactccggtccctaggggcagggccgctggagaggtctgtgagtcttgaactactgcgtgggggtgtgctttcatccacggaaacagaattgatcgctgcgagctccccttgggtcaggttttggttggttgcagcggcaagcggcaagctcaccagacggcgagcttcggccaatgtctttggcagtattggttcgctaccgtccgggccaggtccttggacgttttgcatttccttcagacgaccaaacagaaagttgaaactgctgtccaaggtagcaccaatgttcttcaagctttggtcagcagtggtgcgcacagcatcatttgcagccccgaggactttagaaggtggttggaaaaggttgctgagacgtcgttgctgtggtgtggtggaggcttgaggcctgggtaatgtagaagaggcgggttctttaatctctggttttgataattccggcgatgcagatacagtcgtcacagccgatgtgctagtttccttgggtggccgaaaaggatcgacatgttctgcggatggtgtcgttgtctcactggggggtttcagagggccatcctgcagctcatcggcacgcagtgtagaaagatcgacgttttccaaaaagcttattgcagcctctagattggttaagcagtaagccgtttctccgtcaattttgtttgaagacctgaaacgctggataaaaaccaagttgctgacaatattgatcccttcaggagggcacgtcacgagtgtataaatcaacgtgggtagaatctcgtccgcagaagaagaggacggtaaaagtttagtaagagcgtcaacgatggccttgtgcgccgctgcgagctgctgaagctttccaagggggtatttgtaatcgttcatcttcgcaagatgctcccgggcttgacaaaggaattcattcgcctcgtcctgcttctgcccgtcgattgcttcaaggtccagatcgatcccaaggtccttcagattaatgccgaccagcagcaaagctgcagtcttggaacgcaacttttcatcccgcacatcatctaatgtacttttgtgcctccaaagtttatcatagaccagctcgcagacccttcgctcggcggcctcttctaatgcactccgtttgttttcaagggctctgcgagcctgtcgcttttcagctacttccgacgcagtcagcatttggcgacccgaggctcctgccctgacatcatcttgagagcgtttgctgcttagtttcgacagtgcgcttcctcgtggagcttttacaggcacctgaggcgacagatcccggttgatacgagatatgagagcagatatgtgtgtcgcaatgtgggactcggcgcggctgtagaaaacttggaagagatcggagatcttctcgatcgtggggggcgagttgtgtactttggcgctcagggaattcacaaaactattggcgaacaaggctgtcaggataaaacatggaaacaagggcactgatatgaccacacttaccgatctgccaggctgattagttcgatcggtagctcctcagaagggtcttgtacgcttcgcgaaagcacaaagccatcatctgcctgggcctcgcctgctgtgccggagtctgcggagcctcgtctttcgaatacatcgtgtccactttcctgcccctcattattgacaggtgatgacagaggtgttgttttggaatcttggtcaatgggaaatttcacttccgagccagccattctggtgaatgaccgtgctaaatgcaaataaggctgagtgctagtttcagaggggccagacattttagagccaggggcgatggggttctataaggcactaactgcgtgtctccgcttccgggtacagctgataggcctgtgctgatccgcgtctgggaggccaagttctagcctgttgtccagaagtaaagcgatcagaagtatcctgtaccaaacatggagggtgctgcagcttatcagcaacagaatgcttttctcctggtcatttcagaagacacaaattcacgaggaatctgattcacgcgagatcgcgtcacttcactgggggtactcatcacgtgccgattgctctccgcactgcgtcacttgataagtgaccttgccgataaccgtgatagactcacataggctcacgcctccttgactttgatcctcatcatcacccccatcatgcctcgaaaacggtcacgatttgaacttagcatccacagcctattattatcggttgcagtattatcaggtgctgcctacgcctcaggctactatccaccctctcagcaagtccccatcatcccgccccaggtacctttgaagggggccgaagctacaccagatatccatgagtttgtaagatgccctacgcaacttgtatcacgctggatgacctataataaccgcttatagtccttgcgccatatcttccaccgaggtacctatgaacaacccgacttccatgccagactcgacgtcaagccagatactcgccttcgaactgtatccgaagatgggcacgaagaagaatatattgcatcggagtcctctctgcttgcttcatccagtcctctcacaatacaacggttagccgaccgacgactcccggtgattcaaggtcacttggcagctgcgcggtcttcgggctttgcggccgccttgtctccacaagaatgggccctggacaccttgcctggtccgaatattacagacaagccgaccgtcttgacatttgcacaaatgaccgcaaatgactatattgaggagcctggaacaggacagtggcacactatcaatggcaaattcaactattcggggagctttggttggcaaaaggatggactgaggggccacatatactccgataagacgaatggcactgttgtcatttctctgaagggcacttcgcccgctctttttgatggcgccggtaccacaaccaacgataaagtcaacgataatctatactttagttgttgctgcggccaaggaggctcatacctatggagacaatcatgtgattgtcagagtgctacattcacggcaaacctgacatgcatcatcgagtctatgaccgacgaagaccgttattaccgggcagcgatcgacctatactctaatgttacggagatctacccggatgcaaatatttggatgacgggtcattcgctaggtggcgccatgacgagtctggttggattgacattcggattgcctgtagtcacttttgaggccgtcccagaagcattacccgcagctcgactcggcctcccaagcccgccaggttatgacccacgatttccacagtcgcgacagtatactggagcctaccattttggacatacagcagacccagtatttatgggaacctgcaatggaattaactcgatatgtacgtggggcggctatgcgatggagtcagtatgtcacactggacaggtgtgcacgtatgacaccgtggcagacaagggctggcgtgtcggtcttggtacccacaagattgagaacgtgatatctgatgttcttatgacatatgacagcgtgccctcatgtgtcgcagaggaagaatgcttcgattgcgaactctggaagttcttccgaagcaacggctctgagatcacaactactaccactaccaccaccactaccacatctcccaccagaacttctacctgcaagacccccgggtggtggggctgtctggatgagagcacaactgctactactacgactacgactacgacgacaagcactgccactactactacatgcatgactcctggttggttcgggtgcaatgatcctactaccacaacagccaccccagcacccacagtgactaccactttgcccacggtgactagtacaacgaccagctgtcacgacccagggtggtttggctgccgtgacgaaacaagtacggtagccacgactaccgctaatcctgcctcgcccacttccacagcctgtcatagcccgggaatattctggggatgttgggatgagccaactagcacgaccgcggttacctcgttgcccgctttcacctcggcgcccatttccacaacatgtcatagcccgggaatattctggggatgttgggatgagccaactagcacgactgcggtcacgtcgttgcccgctatcacctcgacgcccatttccacaacatgtcatatcccgggaatattctggggatgttgggatgagccaactaacacgcctgcggttacctcggcgcccactcctaccagctaacccctattccttcccatgcatgcacttgcagcatactctcagtgtccccttgatttcgattgatctgtaggttcttgagaagccgcaagcgctagatatacccacgcacttttacgatttgttcggaccccaatctgctttgggtttccttgcgatatacaagatatacgattggcgcattgagcgagcatttgtttttgtttttgcttttgactttttcttgttgttctcacgactcagctgagaacttttttgagtatttcttcgatcaattccaagggaagcactatttgaggtactctgtcgaggcacagttgatattagccaatacctcgcgcagcaccttggagggactgacccttggaggttttcgggatttttttcgggttgctatcatgcaatggagattagatcaatgaattcgttgaatataaaagtgtgtatttgactctgctcaacaagtctgcaaggtcatctccgtaccggatcggaagccggggcttgccgatctcggatcgtcccggtagaataagttcaactgacagcttgagctcggatcgaactgcttaattgggaaaacttgacctccccggaatgtctctccctcttaagtctagccatccatttacaaattccatctttagtactccaattctggggagtggacccgatagggtgacattggcgattggatatcgaccattcatgcgcacgtaagaggcccagcgtttttgcagatacatcctatatcaagaaagctacatgtaggtagtgatgttagctgatattcagattgatttgtgggccaatagacagttggatgatttccatatcaaaccccggtgggtccataggttccgtaggacttttccatggctccccacatgacactttttttctttgccatataaaccagagagtgctcccgggaccttcctctcttctccatagatctgccatcatgggtcaagataacgagcctagtaggttttgcacccatcaaatcctagaacaccaactaatggtcttctcttcgcagaaacctaccgctacaatgagactccggtctacacggcctccaacggctgcccagtacgcctagctcacttcctcctgagtcgcaaggtctaatcatatacatataggtcatggacccccaggctgcccagcgcattggccctaacggccctcttctgatgcaggatttccacctgatcgatttgctggcacactttgaccgtgagcgcattcctgaacgcgtggttcatgctaagggtgctggtgcctatggcgagtttgaggtcactgatgatattagcgatatcgtatgtaccgtctgggcaacttctataattccgcggagaacactaggctaataccgcatagacaatcattgatatgctcaagggtgtgggcaagaagacgaagatgctcacccgcttctcgaccgtcggtggtgagaagggatccccggacagtgcccgtgatcctcgcggattcgccatgaaattctataccgaggagggcaactgggattgggtgttcaacaacaccccggttttcttcctgcgcgaccctgctaagttccccgtcttcatccacacccagaagcgcaacccgcagaccaaccttaaggatgccaccatgttttgggattacctttccacccaccacgaggccgttcaccaggtgatgcacctgttcagtgaccgcggtaccccgtactcctaccgtcacatgaacggctactccggccacacctacaagtggatcaagccagatggcacgttcaactacgtccaaatccactgtaagaccgatcagggcaacaagaccttcaccaacgacgaggcagcgaagctgtccgctgagaacccggactggcacacccaggacctattcgaggccatccagcgcggcgagaacccctcctggacctgctacgtgcaagtcctgagccccgaacaggccgagaagttccgttggaacgtcttcgacctcaccaaagtctggccccagcaagaggtgcctctgcgccgatttggccgcttcaccctgaacaagaatccgcagaactacttcgcggagattgaacaggccgctttctccccctctcacatggtccccggtgtcgagccctccgccgacccagtccttcagtcccgtctcttctcctaccctgacacgcaccgccaccgcctgggcggcaactacgagcagatccccgtcaactgcccgctcaaagccttcaatcccacacaccgcgatggctacatgaacgtcaacggcaactacggcgctaaccctaactacccttctaccttccgtccgctcgcccacaaggccgtcaaggctaaccaggaacacgagaagtggtccggcgctgtcatcgccgaacagtaccctgtgacctcagaggactacgtccaggctaacggcctgtggcaggtccttggccgtacccccggccagcaggagaactttgtcggtaacatctctggtcacctgtgcggtgccgatgagcgtgtccgcagggctacttatgagatgttccgtcgtgttaacgcggatcttggttctcgcatccagtctgctacggaggctcatgttactggtgccccgccagcgcgtttgtagttgcacttttccttacttggttttcatactcaaaataatcgtgggttcactccacatcactgcatatagatatatcagcaatttgaatacgatttacgaatttgtacgatactttattatgggctaaccgagttcttcgtaaatttcaggtctatgaatggcttgtacacgatattttaaaaacagtaacgctttccactgtgctttgaaagttagtcttctcgcaattctgcctagcagagatgaacactacgccatcgagtaagttggacatattacttatggcctttgtataaatttccgatccttctgattcgatctcttctactgcccgtccaagaaacgacctatcaatatctcattagcattcaatccaatgacacagggagaaagatatccagggcaactcacgcgttccatgataattaatcctgttaatagccgtatgttgatatgccgccgtaaagatagcgtaattcacaggagtaggaacataaccgatggcagggtcatcatccatgtcataacggtagttgaacgagtcataaatcgcagtgttagcatcagccggaagccttagaaacttgttcctatccaactgataaatcaattgcgatctatcaatgttgttagcatatgaccccaaacatatcagaaacagaaacagaaacaggaagaggaacaaaacttacagaaaatctctacagccaaccaattgctcgttgggtgtatcaaagtgacagggcaccaaatgagtattccgaatgatcctaacagcatccccaactgtcctgtcgccgcccatacgtagcttgacaactcgcatcgacctctgatgcgggccttcgtacccgaaagtactcatatttagctcaccagtatatgaacctagctgtggtcccgcaccttctaaatccaggacaactcccctggtgccaataggtgcgtatggggtgtcgtcttccagtggatgtaagaatgtgagccggaggatgcaatggttatttcgctctgggtccttggaccagtctatgtctttcggccccatgtctagaatttcgagatggcatccagaaatcttcttgcgggaaaggcccatggggatgttcatgttacctatgagctcgtagtcccggttacggactacgttctcggctgggacacgaagagggcgcggtggtgggagaagaggagaagggcaggtattcccggaacgaagactgcgtggcatttctgtgtaaatggttggtttacttactagatatgtggtgttggtgatttggctgctggtcagggattggtcgctgttaacggattggttgcggttgggaagtggctgttattgactttgaaatgttcagtatagagtacgggggacggattgtgtcttatatattagtagacctttgaaaactagtactcgatggaaccatgagattgtaagaaaatagcttattatagtgatcgagcaacatctgaaagaagtggatagactataattaaccgagtcatcaaagagacaaatatagatgttcaaagcaacctttgaagagtaattagaccaatacacattgtccgaagagactataattaatcgggtcgatcaaagaagatcttgtgaggggattccgggagatgaacattgttgcttgaactaaaccctgaatctcaaatagcattgttgatcaaagaaactaagtcgtccgagcgcaggtatgttctaactattggcgatcaatgtcggattcgatagattctataggataaagatcgccgtttctagccggtttatagtagagatgagatcaagagtatacgtggttcattattttccggtgcaaatatatacagcctaatagagagttagtatatgtaagataataaaataatccgaatactccaattcttgaggttgtagtacattttttattgctgcaaggggaattatagttcccccacgtggggttgtaagaccaagtccttcccgaggtcgtatagctttaaattgtatacggagtactatataatcgttaaattatattaggtctgatcagcaattacaactacctagaataacagataccatagcgccatccagacatataatcaagttcacactgttaccatgacccatcacttgccccatccgggtatcgccaagcttcctcatcccgcgaaaatttgcgcttggaggcatcgagcccgtcaaattccccgttcccccaccaattcggaccattgacttttatcctctttttgtctagcccttttgcctctgccgcagtattcacttaccctcggtaggcgtcaaggggacttttcgccgccctggagtactcgcgtgcaatgttcccattgtgggtactctgatttttctttcccctgacttccgaaccaggccaacttttaaaccccatatcgaaagttacttgagacaaccctccaattcctcccagagcctcccggttacctcgcccatccaacatggccgaacccaaggcctcagatgccatcaccccggtggatggccctcccgcatacggatactctgcggccacaggacccgcttcggactcgtccatgaccaaggtcattcaaaatgcaaaggcagccacggagaaggagcagtctatgagtttgatgcagggcatccgcctgtaccctaaggccgttctctggagcgtgctcatctccacgtgcattgccatggaggggtacgatattagtttggtcaacaacttctatgccttcccgcaattcaatcgcaagtatggtgagctgttggccgatggctcatatgaagtttccgcagcggtaagttcaaccaattccggcggcggccatccctccatctcttggagtggggtgggtttgcctctctgcgggatgaagaaactgacaattgtctgaatatacagtggcaagcaggtctgagcaacggtgcctactgcggcgagatcatcggtctattcatcaacggctgggcttcggaacgattcggttaccggtacacgattatggcctgtcttatacttgttactgcgtggacgtccatcttcttcacggctaagaatgtgcaagccctgctcgcggcagagattctctgcggtatcccctggggtgtcttccagactttgacgattacgtacgcctcggaggtgtgtcccgtggcgctgcgagggtatttgacgacctatgtcaatttctgctggggtcttggccagcttattggcatcggtgtgatcaagggtatgttgaaccggaacgacgaatgggcctaccggattccatacggactgcaatggatgtggccgctgccgctctttattggtatctaccttgcgcccgaatccccgtggtggttggtccggaaaggccgcactgaagatgccaaacgggcccttgtgcggttgactagtaaaagtcagggtcaggatggagatttcgatcccgatgagacagtcgctatgatggttcacactaccgctttagaggaaaagattacccagggtgccagctacttggactgcttccggggcactgatctccgccgcacagagattgtctgtatggtctgggccatccaaaatcttagcggaaactcattttccaactactcgacctacttcttgaaacaggctgggttagactcctctaactcttatgcctttgccatgggtcaatacggcatcaacatgattggcgtttttggagcatggttccttatgacactcggaatcggccgacgaacgttatgtctgtacggtctctgtggcctgtgcactatgctattagtcatgggtttccttggccttgttcccgaagagcacaaagaccaaggctccctagccacaggttccatgatgttgatatgggccctattctaccagctgaccgttggcacggtctgcttctccctcgtagccgagctctccacccgccgactgcaaatcaagacagtcgtgctcggccgcaacctgtacaacgtcgtcgccatcatctgcggcgttctgaccccttacatgctgaacccgggcgcttggaactggggcaattacgccggtttcttctggggtggcatttgtttcttgtgcatcatctacacatacttccgcgttcccgagcctcgcggccgatcgttcgctgagcttgacctgctctttgagcgcggtgtcagtgctcgcaagttcgcgacgacccaggtggacgttttcgatgagaccattgagggccgcgtcattgatgattaccgggcggagaaaaataaccggactgatgagagccaattggagaaaaatcacggttcgatatgatgcgatgtgtctacgtttacgactaattctgcttctgggaacctaaattgttaggcactcttgcatgtacatagcattttcagcattaatagcattaatctaatatcttcacatgatggtcaatacaaatgtaaaatgaattctccaatttctctcatacctccactcctcttttggtgctgagagccccagatgatactgcactaggtaatataaccaatactttattctacagctccaacattgtgaattacacaaaggccatgggaaaaaaaaaatccagcttcttcattccaaatgagtatatgttctacccatcatctattcatgggaccactcaggcttcttcttctccgcaaaggcagtcatacctagaataatcgttagcaacccacatctcaaacccagtaattcagcagaccaaagtgtcaactcaccaatcttctgatccttgctgccaaagagcgcatggaacaaccgtctctcatactcaacaccctccttgagcgacaactcctgactcttattaacaacctccttaccagcaacaacagccacacggctatagctggcaatagtctcagctgtcttatacgcctgctcaagcagctcctccttaccacccggcacaaccttcgccgcaacaccccactcaccagcctccttaccgctgaagttcttgccggtaaggataagctccatggccttgctcttgccgatcgcacgggtcaggcgctgagagccgcctgcgccggggatcgtgccgagcttgatctccggctggccgaacgtggcattttcggagcagtacaggatgtcgcacatcagggctagctcgcagccgccgccgagggcgtagccagagacggcggcgatgactggggtgcggatggaggtggcgaggtgggaccagggcgcaatgaagttgtcgctgtaggcggcggagaagcttagaggggccatttctttgatgtcggccccggctgcgggtttgtttggttaatattgttgaggcatattagggattgggccgagggagtgaccggaaaggatatagtgaataagtgcaagtagagcatgtacctaccggcaaaggccttctcgcttccagttataataatcgcgccgatgctcttgtcattgtcgtagttgctcagggcttcattaagctccttgaacaatggagagcatagtgcgttgagggccttagggcggttaagggtaactataatagcaatgagaattggtcctgtagtatattgacagatgttacatactcaatcccacaccgggcttgggggtcgaggtgaggatgtgctcgtagctaccagcagctgaagaataaccccggactcgggctaggtaggaagtcaagggggccgatgtccgggaagtggccagacgagtgcattgacgggcaaacattgtgatatgtcaagcaaaaggcagctactttcagataattgagattgaattatgcagagaaacgagggagtagctacacgataccatcatagatggcccatctccccgcgaccgatgaacgccgaagttaaccgtcccgaggtacacgtgaagaggctaagcccttttagtctgtcttatgtcactgcaccgccaccatcttgactgtgccatatctcacgtgcccataagtggctggtgactaatctctaatatgattggcctgtgggcagtggacacttttctgtcctgaagtgcagtgcctgtccgggaatgtctggtttcagcagcttatcttaatcactgctttctcctttgcttttcctctttactttctttctttcggtggtctagccctgtgctttgcccattctctaattcttcatcatggatgtccctgagcccgatcagtcgcccttcacagccgtgtccgcgcacacctctaaactgactcgagtgagtgtctcgtgaggggcaaagacattgcgcaatgtctttggatcctttatttctgaaattagtcgcaatagtttgatcaatatgctaatacatcaaccacagcactatcaagcctacctcgatgcctcgaccccgtacacaacctaccgctgggttggttccggcgtgctcctcttcgtcttcttcctgcgcattttccttgcgcagggctggtatatcggtatgactcgattgaacccctgaactggaatcagcaaagcagaaatgatgcgcttcagctccagcacgcgaaagccattcatccaccgcggaacatctacataaacaaaccgctaacgctggaatctcattcacagtcgcctatacgctcggcatttatctcctgaatctcttcctcgctttcctgactcccaaattcgacccctctcttacccaggacgagggccttgaggacggtgacgccggatcccccagcctccctaccaagaaggacgaggaattccggccattcatccgccgtctgccggagttcaagttctggcactcggccactcgcgccattgccattgcctttgtttgctcttggcttgccgtcttcgatatccccgtcttctggccggtgctggttgtttactggataattttgtttgtgttgacgagtatgtttccccctttgatcggaattcgatgccgtacctgtatcggtttgttgtggatatccgtctaacttttggccctttttgcagtgcgacgacaaatccagcacatgattaagtaccgctacgtgcctttctccttcggaaagacacggtatggccgctcatgagatcttcaattcctgaacttcctttttgtctctgactctatatccacgattcgcatgtgcatgtcctatatctgtatgtgcactttggctgggcaacagacagacatgatatgataggaggtgaaagcgccgggctcatggtggtccatttatgaattttcccagactctttttttaatcactgtttgtttagaggaccgctgctttggcgtgttccagtcttcttcccctgtgaaatatgattagacctgaagtcaatgaatgacctgacttgcaatatattatttgaaaagcaagactcccaagggtccttttaggatttcttcattttatagttcgcttaatgggaaagtaacatttgagacatttcatgtgaagatgagcgcatttgagcttgtatgctgtgatcttatttgagaacattttagattagatcatcagatgaactcaactcctcattcatccaaaaccccaagggaaaaggccatataatcttctctggcctggtgactagctacgggctttcttactcttgcccctccccaagatggagtaatacaatcgccgtggacttgatcatagactccgactcacactcgcactcgaatgaacaccctagcgcaaccatgaacaaggacatgaacatgccagccgtgttctcagcctccactgaaatcacaatcctcttcacaggctggacaacctcaacgacgacgcaatacatcttcacgctgacctttctattcatcctcgccatcttcaaccgcttcctcggcgctctcaaattccaactcgagagatcctggtcccagaatacctcccctccaatcctccttctcgccccagtaaatccacgacaaaacatccgaaaagcaaagctcagtcctcttccagactacatgcgcgtacacggggacgaggacgaggaagagactttgccagtttcaaataacaatgaaacacgaagcacgacaacgagatctctcaaaagggatggccctcggaagaggatgtcattgacatgcatgctcccgtcgtggaaggccagtggaacgtggagtcttcggaaagacgggacacgtgcgttgcttgaatgtgttagggctttgattggatatttcttgtgagtggtcacatctgcggctgtctgcatactgtctttcgtagaatgactgactaattttcgaaatcgaaggatgttatccgtgatgaccttcaacgttggcgtcttcgttgttgtgggttttggcgtcctggtgggtgaactgctttttgagagattttctcagggaacttccggctggcaggaagggacttgtcatggtgggtgattccaccgcgtgctatgtgacgcgtggtgtcttataggggcagcttggtggccttcctatgtgttgattgagaagatgtcgaagagtcacctacacaaatgggagctccgtgagacggcctgtgtgtggttggtctgcgtcgttcgtactttggacgtagcctcgcgttctttacgagaatggctgttgatggccttttctagccgatgcctattgatctcatacttgacggtacaaacctcaggcctttgtgttttcatcaaggaacatttgcgcggcaacatattcgatagctatagcacaaatccagcccaaaattattcccctatggttacgtacagcacctaagtgtttcagctaggactggcccaatatgtttcactccgctcagctagcatcagaaccagagatcgtcttgagattggtcaacccaatgcgactcattaccttccaaggttgttctacctgtatgatagtatcgacaccaatccttgtgtctccagtggaataggaatcgaaggcacagcggatcaatgatgatccagcacaacccctgtctgctgcactgtcttccttacaccgcacctttccttcacagcctaataaaatatgttcccatcgcctggatcattcccttatcctttgattcactctatttacaagtaacattcattaatactcccaaaatgagttcggaaactccccaggaatactcagtcgacgaggaaatcctttactttttccgtaagacttctgcgactaagtcatcttgtgatgcttatgcacaggagctcgtggggggatctgtcgtccctgttacggtccaaggcgtttgcagctataccgtttacgcgggccctaatcacgagttcgtggttcagtttcggttgcaatcgctaggcctgagcaccaaaatgaccactctcgcctgtgacatatatgggtctttggttccatctgccactttccatggccagatcggagaagagggcgtcgatgggaaagagcccctctccgtctatgtgatgagccgagtaaaaggcatcagtcacctcgatttcatcctggctcataatttcccggaagattccctcgagtattgtacatggcgggagaacttgatgtctgacattgcggggtatgctggtcgctgttcttcgcgatatttatgctaatatttccagattccttggtttggcatggaagaattctttcgatgttaacccatcagatcgagaagccatgtttcagagatacgagaaagacctgcgccaacttctcgctgctctgcccagtcgcttccgccccgtcatccaacaatccattgattctctgccagctattttctcacttcccatggtccttgttcataaggattttggcgtcaataatgttatggttgacgccgacgacaatcatctagttggagtcattgactgggctgaagctgaaatcggtccttttgggacgaacctgcattccctccagcaattcatgagcaaatatcgcctccgtgtgggctggattcgccatgcaaactatgaaaccttggaccgcatcttttgggacgccctgtccacaagtgccggaggtctcgaccccaagaccattcaaacaatcaaggcggcaagaattgttggtcttctacggtcccatggattcacgagtcgtcttgctaataagccggaaccggagcccattcgtgatgatgaaagtggagcttacgagatgctggggctagatggcttgcttattaacccagctacaaagcttgtggattgaatttgcgttccttagtagcctgaaattatgttttgcgatgggagaatcatctgaataaacggatagtccatataatttcactgaaataccgtaaaagcgcgccagaggacagctagagcacaccggcctgggcaagagcaattttcaggtcatcgacgttttccaactttgggatcggcttccctgcgttgaagactttgtgattacccgaagtcatgcccgcatgggtttcattagccgcgcaaacccttggttttccgttgcatgattcaaatcgccaacctgtgatacggtacggagttgcgtttttgacatgagaagtttccagcatgacggtgccttgatcaagaatgagctccgacattgctgggccctcgcatcctagcacctgaagaccgatgatgttctgaagattgttccttacgacataatcctggaattcaggtaggaaaccatgtcccacccctgacaagtcaggaagcgggccatcttgaagctcgtagggacaaaatccattctcagtgaccgcatatatgtgcccatgaatgttcagcgggtcaagagtatcaatcttggtggtttgagtccatcgtagagtaggattctcaaagttggtaccgagcatgacagtgctttcggggatctcaaaatgaccatgaatcaaatggatccccagaacattctgagcattgtggcgaatgaacagtgcggcgagattggtaacatgttcgtcagcaacggcaggctgagcgccatcatcagggaggctgttgtatctatgaagccagtattattagcttttatttaattcggggggtataattatagcaatccactcacagagcgcgactttcgttgagatccttgatctgcaaagccttgtcaagggctggaacagaagcagcaggggcaactagagctgtcatgttgaaaaaggcaaggtggagccggtaaagcgtagtataggatatattccacttcttgaggttgaacttgaactttgtgttcagactgagaaacaagcatctatttatgttggaaagttcgagaggagatgtgcaaacccgatgagcctaatctcgcgagtctgcaaccattgctgggctttgccgtccattccggatggatggggtccaatcagtaggctcatcacgccatgacttcaagcccacctgcagcagattaactaacagctgcacctggccacatgcgtacaactttgagtgcgatgatgagcgaatagagtcataatctgaagctgtactggcgcactcgaggacaggggaacagggttcccctcactgctgacaacgcgcgaaagcaaacacgacttccaaggttgcgtggatggtacttagataaacaaatgattggttggatacggtttgttactctcattgatgaagataatggatcacaggtcttattggcaaagagtttcaaggaaagtagatgtcgagcaaagccgatcagggaaggttggtcgacggtttgggagtctagaagttcatgggtatatatgcttggcgtccggaatgagattgctaagcagctacaaggtccacgggccagtactcgtaaatgtacctaggtagctggtgataattcatccagatggagctgctcgaggcgaggtatgtgcttcagcgcatcctgtttttcctctttgactcgttcggagattcccttttgtcaccctacctaggtctcttcaacctccttaaccaattcacttcgatgctctgaatacgaatacacatgctatacctgaatatcttgcacccctgcactgctgacgtgtccttcccctcccgtactgccatactgtcttttactgtcttctcctcgcatgttcttttaatcacaaccccctgcagtttccaccagttaacgtggcccccctcctaggactcaaaagggagggagaagaagggcccaggagaatcggagtcaagatgtgctatagtctagcgtttatagttttagaattattaggacaggtatattggttagaggtattggttcggctaaatacttgtatatgtgtacactacaaatataggtaaccttggaagggagagaggtccacgggtacgcagcggcatagacgccatgcgacaaaactgaagggggttcgtgatccgaggggggtccacggtagatgtgccgctgacacgcacctccagggctacctaggtaggtatctaggtaggtgcctatataggtatcactcactacatgttattcagaatcgtgtttgtttctggaagcttggtattctagcctttttactttttacttttttctttttccccctcaaggacttgtcatggtaaatatctctctgtagatcaaatcatgatgcgctataacttaatccacacttcgtcatatacctaactccttcaataatgcccatcgacatcgcccaaacaatcccgaggtcatctaccctcagtataaacatgatcgacttgctgctgtaccggccaattctcaaaatctggtctgcaaaccgtcgaccctattcaaagcaatattactacaaatctatgtccaacccaaattccttccattcctctgacacgacatacctggagaaagcggaaccataatcgcccagacctcccgacaactgcaatcaactccattgagatgcgagcacttcgccagcggacgtccagccttgggaattctcttcatcggtcggtcgtagtgtgcgcatttggacgagcggtggcctcgaatacaggattcacttttgtatggtctgtaagtatgattctacgatctctataggtccaaggcaggagatatctcaccaagaccatttatcaccttgggagtcgaatggcatatctctgaatttgtgcttcgaatatagctagtcccaatggaaaaggattgtgccaatgtctatgcctcgaaatgaggggatatggatctattcattgagtaaatactgtctacagactatgtacatatgtatatatgtaggctacttgcgcaaatgtgctcaaatcagcgccgggaggatcgaccgctatatagccttttctggctgatctgtggagatctacgacgttgtagatcccaggttgcatgtcgagatgcttagatccagaattattttcaaagaataatgaaattacaaaataaaatgggtgctataggacaaagctatggcacaccgattccacatgcaaaccgcaaagatagttcgaatcatactcctgacccctgcgcttttgaaggcaagcaatacgaaacactccatctaactccagatcataggtatcatgagaggcacgtgcggcgtaatctgaaaggacatcaaagaaaaagcagatatcgccgtacttaaatcaacagattctccacgctgctcggcatcttgcctccggcaatagcgctgtcccccaatgagagagtcgacattttgcggtctgtactggggcgggacatgtcttcggttttagtacagatccaggtcgatgcgtacatatttaccctagaatagctgtataagcttcgtccgtaacagttaagaataagactccaaaactcaccggtcaatacatgtacctgggaaacgagctcccacgcgacgagcagagaagccgttttcctcaaagtgcttgatgtaccaaggatcaatactggcggaacggaggagaatgcgaccgcccttcttcaaggctttgttgaaagttcgggcttggttaggggctgaatccccttcgggatcaaaccagtccattgagtccatgacctgagatatacaattagcattaaaagtgcggccgagaggtattttgatccttaccacggcgatagtcagggttcctggggtgattcggttgatcacctcgttgatctcatcagtgtggatacgaagtccatcaaatgcaccaggcgtggaaagtcggacgtgtgcttggggtgaaagataggtggggtggcatctatgacggcagttagcatatataattgaaaggcgtaaaaaaaggaagaaaggaacgaacctccgtgagaatttgccttgaacgcaaaggaagtagaaatagttgtcattgctgatcagagtctcgttgaccatagggtcaagagtgttgacaacgtattcccaaattgaccggccgctgacgtccttggcctttttcatatcttccgtcaagccgttgcggcggaagaagtcgtcgacaatcatattccgctggttgcgcggcacgccggcggccttccaggcgaaccattcggtgctcacaatagcccagtggagtggtcggctcattagcacacttcgaatgcgaggccagatttcgcgctgctctgcgatagtttgtgcttcacacagcttgcgaacttcaccctggagtccgaagatattgaagagccatcgcaccatgcgaatggcgtggcgagatccaccggtctcatacagaccatggccagatgtcgaggtgaaggtctggctgtgctcaagccagtactggaaagcctggctggacagatgagggctgagtttggagattagcagttcacggaactgtgcgtgcttgccatcaccgaagatcttccacatatcccggtgacccaatgctgaataacaggcaaccttcagctcgagaagatggttctggttggggttcaagtccacagcgtgcacccggcgggggttcttttgcagatagtcaagaatgttgtcaccagcgctggtgatggccaggatcacgtcgtctttgccgatattcaggagacggtggtcaactcgtgggtcttcccatgtgaatgcgtagatatactcgttctggaattgagtatgcttgggcagcatgtcgttgtaatgaatgcggtagtggtggttctggtaaaaggatgatggaagcggcaggtttgcactcaggttaatcacagcagactcatatgccttggagcgaatctcgtttgtgctcttcaccactgcatcatccatctcctgcttgtgattggcaggaagcaggtaaggagactcagtaaaagacgcattcagcttctcaatggattgacttgatggagtagcttcgatttccttcgggcaaccgacaaatatgtagtagggaatgccgccaagcagatagttccgttcgctggcagagatgacagtaccaaacttgtattccaggtagtcgcgtcgggcggcttcaaggctgacgcggtcaaagtcgaaccaggctctccagaatacacgtccaagccagttgacatggcggttgaaggcaccgccagtatagttgcggcaggacacatccacgatgctttggactagatctgaatgagtgatgtgcgtgtagagattcgaggtattgcttaccgtaaaagtcacatacacccaacattccagtggacttcaggcgggaggtcaacgagtcgacgacgctgtaatagtctggaaaaaagtcaatatcaattgtctttcacgggtcttaaacactcaccagggatcattgatagactgtaactcatagtaaccaagtccacgccaccacttgcttcattcgtagaccgcgggttgagctccttctcgggtagttggaaagaccgggcatcctggcagagaacagtgacattcttccacccaagacgctcgaagcgctcgcgggcgacttcgcaaagggacggggagaggtcgaccaagtaaacgtgtttgaagaacttgtccaccggaagaaaagccgccatagcttcgatgttgtatctgtcacaagtcagatgttctgtctgtatcacttcggggaaccccttgtgcctacccagtaccgccaccgacctggaatacattagcgctagctcaggaaggcagcaagccaatactcacatccacccagacagcctttccagacttgacttccttgttggtaaccttgtacttcatctgtgcggccacaagaccaagcatgtcctcgcgaccacagagcagacgacgacgagtggcatcgtaaattgcggcctgatatggtcagcttcaagccatatccaagctcgtggtcacttgatcgcacctgagtcttgtagaagctctccaacgcatcctgctggcccccggccttcttatcgtgcggtttgaggaagttcgcccagatgaatttcaagtaagggccaactccagtgttggcgactttgatctgctgagaggagacgaacagaaccagaccgaccaaggcaaaaaccagtacggcggctgcaccaatgtagacgtgcatcagatccatgttcaatatgtagagagtgatgcaatgaacggagagtgagagaagcgaccgtgagattcaaatacaaattgaattgggttcaattgaccacatgccccctcacgaggagacggcagcgtgtaccttgtcctatcagggcgacacatggggggtgtgcagacgataagagagagtggaggggcacggggaggtacaatggacatggactacacgtatactcaacgtacattaatgaagtaacttgtacctggtccactatcatccactatcattcctttgaatcgaagtagtcgatcatcccaaagcagcatgaagcgaactaaatccacagcgaatccattgcgatgcaactctaaggacaattgggttcctgcagtagtggagtttccacggttcccctaaatatctgggccactcacagccaagtcacttcccatgtggttcccccaaagtcttggcacggcccgttaaggtcccgtcgacctgacccgtggggcctacggtgcccccaatagggccgccaccaaggccaatctttagggcccacgggcgcccaatcaactccttgcttgctagcacacggggagttccccagatttgacgggatctcagtgtcaccccataattgagtataaagtagatcccggaggatttcgcgattatgtactccgtactctgcactccgtacctaggtacctacgacatacaacataggtaacatccagagcatttgtcaattctgtttgggcacagtcgctaacatatcctcgcaaggcaagctagctaaactcaaaacacaagcccatgtgaagctgaagctgaagcgcaacttcggtatggccccatcgtctagcgacaatgagaggactttccattgcattgtcctcaatgtcagctttgatgcgggcgtccgcgaccaaccgcaacaccattgcgcagttcccctccgatgccgaaagtgctgtccggcctggattatcaacgctgttgaccttaacatgacgatgccgaaggattctgtcgactactgtaatatagcctctgcgtatagccatcgacagcgctgctcctccccacttgttccttatcttgacgtctagtctctcaccctgggcaagaagcaataacgcgatttccatatggtcctgctcaatggaaaataacagcggcggctcgtagataccccatccatggttgaaaataacttttggatactggagcacagtatagggtcctcttggataccgatggaatcaactcgcatatctggtcttgtgaaaagcagatcagtgacggttgggtctcctctctcaactgcccaactgagtgctgtccgattctggtgatcggtgatgtttggatcaagctgtctcgtccaaatgagagaccttagaacgggaacgcttgtcccatcaatttcctgatggcctagcaacaccgccactgcttccaagtgtccatgcccagccgctaaatgcaagggagtccggtcatagtcatctctgatctgaatgaaggcagctcaggcacattctggggggaaaggccaccgttttgaggctgcttctggtgacaactcatcgctcagagccttcatatacatatcgaagagatatttgttcatcttttttgtggattcccattgtccgactgggatccagccgctgtcgtcagtgcggagttggcccttgacaatatcccacaaatatactgtgtcttggtagtgttggacctgcgcctcgtgcctttgaagatcatcttcggtaaactcgaatggacagcttcctgggagccccatattttcccagtcgtggaaaagtcgagtaagagtgtttcgtagaggaaccatggagccatttgagaacaactggcagcaagtgaaaggctcccacagtcggcggtccatcttcattgcgtcgtagataggcttgttgtatgcaaggcaagacatctcataatatttagattgggccgctaatgcctgctcctcagcagccttttccttttggtctggatttagctcttcgaaattttccggtaaagagggtatttcagttcccgcactgtagtttttgggtggccgaatgaattcagggaactgtgcctgaataaacaagggagcggcttgcgctgactgccagtcaatcacgccttcgattgtagttggatcatcggaggagacataaatatttccaaggtgcaagtcggtatgccaaattaccgaacctgctccttctagcactcgcggatcgcctgacaggaccggcagaaccagcattgccttccgcaagagatcacaatattcatgaacagactgactatcattgaaccgatttagatggcggtgtacttcgtccctgtcgtctgcagctcgggctaattctcgatgtggtaaagagagcgcgaaatccaagattgaagtccctaacagtgtcagaagttaagcataagaagtataccgtaaaacccacaaggcccaacatctggttggctgcaaagcttatgatatacagctcggttgcacgaaggtccaacgcagaatgcgccagtcgggtccagatccgatgggagtgtatgacgtgaataatcagacgacaaagaatcccgcaaaaagaggcttccatacgctggtagtttcaggctctcaagctccgtctccatcttcacgattccgtcgattactttatagcgttccagagtgttcatggtcccccatctttctgcaagtgcaattccacggatcttctccatgataatatattcagcgccaactggatttgtaggatcggaactccacgcatacacttccgggactcgaatcgacaaatgggaccgtactagacagtcaaaatataagcaggtgggcaataggtgaaacttggagaacgtacaaaacttcaaagtcgctacttcagacgccgttgtcagtaacggtgtcccagcatttggacaaggaattttcgcgataacctcattgccatcatccattgtgagaaggaaagccttgttgaagtttccctctagtttgacaatgtgtacgcactttgttccaggaccaaagagtgcggcagcttgagagcaaagattggagacattgaaattcacataacgctgcttctgttggtgctcctcattgatcaaccagcggccggaggtatatctgaaaaggtcgtcctggtcgcgcgtgtcgacgcctgccattcatcagcacttctgtacatagcccatagcaaacataaagaaacagatagacagactaatatctctcattgtcggccttttcctatgtactgtcgtctgcaaggcgcggttcaaattcgtgaagaaaaaccgaacaccagtcaacctagagcggatagggcgttgcaacgaacaaaagagcgacgacttccacatgatctatagagcatgctatctgctgtgacactgctaacagaggatcgaaaagttaacccggaaatggacagtaaattgcgacgtcaacgacgtatattcgatactcaatctgattaccaagggtgaaggggtaaaggtgctcacgaaatagatctcgaggtgctgcttgaagttgagacgcggaagaaagaaactcctaacgctggaagctatgcagaggtgaatgaactgtaatagaaatgaaagggggggtggaagcacaaggtgcgacgtatatgccggtgttgttggccggctaaacaaaccgcatacagaaatgtaccgatcttaccatggtgttcaaaaactaacctgaagcaggaattcacaggtcctcgtggtcctcgctttacatagtaaaaaaatgtgcattttgatcagagaaaatcatatgtttctgtcaaattaagtattagtgtactcgatatattgatatatatcctttttaaccttgacgcgcgcgtttctggccccttccacatctatatgcacgtcttaggactcggtgcgctagtaattctagaacccgatatgctctagaatctcaatcaggactttctcgttctcatttcggcagttttgaatggcttgatcggtttgtctccttagaatgtctgaatttgtcacgcgccagggcaggatagaactaagcagggcatcgacattagcgacaatgtcaatccctgagattgtcatcgggcgcctgcaaccctcattctgaagggcgtcttcccaggccttcgcaactttccactgaactccctcgccgtcttgctggtcatcggggagagggtctgggaagccgtgtaacttggcttcctttagggccctttcttcacgggcctcaataccgggccagcccccaaacttgccgccaaatccactaaaggagcaaaggaactcgtgtgaaggatggagaacgcacgaaaagtcgtagtcaattaatcctgtgatgcgacctgaggaaatgtcgaataacaggttgttgggtgctgatagaaaacatcgataagaacaagcgtttgggttcgggaggtgaaaggggaaaatgcttactaaagtctgcgtggattattgccttgtcgtcgtgcgattcaagctgcttgaaatactccgggagccctcgctctataaaggcctcgagtcggtcccggacgccattctcatgccagccccggatataagaattctcgtcggttttcttcagagcttgcttgagctgtgcttcaaacgcagcctcgtacgagagccagggaccagtactggtggtggtcattggtgcactgattatgttgttctcgttatcaaaggtcagtcctccaaatttagtaatagaggcgggcagcgggaagtcctgaaggcctttgaggacctttgcgacctgtgcaaatatttctttcttctcctcgagttccatgttatctagtttttcgtctagaggaacgcctggcatgagctcctggaggatccaaccttgctgtggctccccttttttagatgtggctccagcccagccatacaggcgaggcacaacgttgggttcgaaatttggttctagtgcagccgcagctagagtcatcatagcaacctcattctcgacacggttggctgctcctatggatgtagcatcagagtttgtcagacgaaggatcagatcactagtgccggaaggaatagccacacaaccgggcttgttctgacaggccccattctctttgtcgagtggagccggcagagagacgcgatacacaaaattattgtacttaaaggggcactcaggatcatacgaaattggttcaaccagggtatttgcctagtgagcctctttagcagggttcataactcattttatcttcaggcacatactggcagaccgaacgttctctgcaataagccatgattgccattaataaaattaaggcgggcctgataattggaatggttgtggttcatatcgtgttattcggtgaaaaatgatatttgttgggaaagcccttgtttggcggagttagattgaagtaatgatgtgctttggcctgttttattataagctcctactgcacccacgtgatgaagaacgccataccctgaaagagcaaacttcagtgttgtccgttagtgacgatagtctacttataaggaatatcatgaacctgaaacccgaaggcatcgaggcaaaagggacgctctttatagaggccgcataacaaataagcgctcagtttgccactcaagatcaggcacccatagagaatgggatgatctcaacatacaaaactacacaaatgcagactttaatcgtgaactacgtacattggtggtaaccattcactatacttaacgccattttccattgctcagacgccagacccatgggaatctacctaggcagatatttagagattgtaatgttcaaagaaagatccataatacataatagacggccacgaaaatctattcgtcatcgctcatgcgagtatcctcatcggctggcttttctgtctcctcattctccaacggttgctcctcttcctgagcaacgggctcgggtggcatattgcttgcaaacttcggatcgatacgtagacgggtcaaagcacgcttgtagatttcggcctcgttggggtcacgcatgactatctgcatctgatcaatgcgttcctcaatctcttcctgttgggtggaagttggagcaagaccggcctgggcgatagtgcgggcacgctccggcttgaggcgggccttgcctgagattggatagtagtaggcggctaactgtctggtgtcgccattcttgggttcgaagagcgtcaaggcgatgtccttttgctcggtgttgaaaacctgagcactggtggcgtaagtgcgaatgcgatcataacggtggaacttattgccatcggcgctctcgttggtgtagaggtcttcgctgtctcggtctggattggacaggttcatgcttgcgtcaatgttcttaacagattggggcttctctggaaggaagagctggtagtcataagggactgggcccgggtgggcatagagagcagggttcgtgttgtgaagatgcactttagattcatgctccacgcaaacgcgctgctcgggcgcgactggggtcaggataccaacgtcaatacgcttgtcccgcttgcctgcgacagctgccaaaggcgccttatcaaatttgaactgaaggtaaccaccagggtctgggaatccttccaggtcaggcatcacggggaagaaaccgactggcttcagcttcgggttctcagggtgaacgggattagcccaggcattaagttctgcctttgttgggggcagaccacggatgtggctatcagtgtcttctccagagtgcttgctctgagggtaggcgatatcgaatcctttttggatgaatttcttaacatgtttcggatcatccacgggaggcttccctttcttcgcagtgcgtgcttgtggtttaacgggtgcagggcgcgatccatctccggcactgcggtcgacaccgatatgttgtgtacggcggaggaaactgacattggtatttctgggagcaggatttcggagttgctcaatagtcatgagaaggggaaggtcagcggggtccatgggctgaggattctcgggtgccataatagctagtgaaaatgttagttgcagcaatgcaattataggggattctgcgttgacataccactctcgtcgcccaaatgtaaccccggaataccgacaaggtcaattggcattccaccttcggcatcgacttcaatgttgggctcctcacggcgtgccaggcttgaggcaaaaccgggggtgaggaagcgactcaagccctcgtgcgggatatcaaggaacttcgggggcatatctgggggagggagatcattgcgatagcggagggacgcaatgtactcctggtgaaagccacctgatgactgaccctccttagatttggaagacatattcccgtcttatttgctcgcgcgattgactggggggttaattgcacattagcaacttggcgtacgttggaccgagtgggacggaagctcactgtaatggactgcaatagactgagatgagttggaatattgtcacctcaactttggcagacaaaaatggtagtgcaactacagtagccagttagtatgagagcttagttcagaatggagacgagggaattggtcgcaaacctacagtgaggaaagtcaagggcttgtagagagtcaagggcagcggcgtggagaaaaattggcaataatatcaaaatccagtggttcagcttgccagtagaagaggtttatccaaactgcccacaaatgaagctggaggaatcggcaaaagctaccattcaaagcaactccgaagctgagcctgaagaccattattctgcctagattcaccgcctgtttactgcgtggagatacattggtgatcacgtggaaagacgggaagacgggaagtatgagtattgaaagagaatggcatgcattcttcaaacctcagggcaacattgaacagttcacatctaggttcttcccttttagctcatttaattgatgctcgcaggttccagagtactcgattgtattataaaaaaaatatcgaaattccttttgaaagtgaccaaaaaaaaaaaaaaaccatgcaagtcctacgccgaattctcataataccgtaaatgattcccccaaagtacacttagtaggcccacatacacttgtacgccatcagccggggaccaagtcgatcatactccagccttccgatccaactgtcgtttgtaccggtcagtttgccgaaaatactggctcccttccatacaacaacctggggatcgaggtctctgggcggtgtcccgatcatgatctcctttgagaagccagggcggagagcctgcagtcgctcttccaagaagagatggaacccgctagtcaaactgcctccaccgacgaccatgataccgccgatgaaatcccgcatcttcttctcgtctgagcgagacgcgtgcgcaatggaggtcaggatagcgttgtccagaccaaacacgggcatgatatcgtcacggtcttcgaccgcaggagggcggggagcctgggctacagcggccgtggcagcgggggtgcttgtccctcctgcttgaggcgtccctgtgttctccggtcccggagaaccagcgacggaagatcgaggtgtgccctccatgtcttggactttgctcaaagtgttggggtgttgagggcggcttggtgtggcctgagcatcgggcgccgccgagtgagactcgccattcgtcttgccatgagaggggagggcaggggccatggcagtcaagatctctgattgggctgcagaagtaggatcattgggtgatccatcatagatgtcaacagaacgatcgatcaaggtccgtctcccgataattttgtcagagttgtcgaaaatatcaggctcaaaaacacccattggcgctaagtgaacttcgtcaaaagccttgaaagtatactttcgtgtatcttggcctgccacacgaaggtggaagtcaaagacttgtggagaaacgctggcttcattcatggtgcagatgttcttcttaagctcttcggccagaaggaagtcatgtctacgccataggttgatgtcggcataggggaaatgatcgtgcagcatcatcttgacgaacgtttcggtcacgtcttggccaccatacttcaggttcactcgggagttctcaatgcacatgccttcttccacacagcagatcgaagtcttctgggctccaatatcgacgacgcatgccgaggtgaagccggcaccaaaggtggctgccagactctcttggatgaaacacacccgggcgaaagcaaactctctcatcaacatatccaagacctgggtgacataggacttgtcgtaaagatctgggatgacgaacacacacgaatactgggtccagtccttcttgcttgtcaagcgcagttgattcttgatcgcatcttccacgatcaatgaaatatccaggaagagcgacctcttgcttgtgtagtctttctcattgcaccaaccattccggattggccaatacagcttgtatcgaggttttgaagaatccggtacccgtagggccggctgcccaacaatatactctggaggaggactagagagctcggtccattcggcacgcataggatcattgtgttccgagataatttccggcacagttctgcggttatagttgacgaccatctccttggagtttggaagcattcttcgcttgttctgtcgcatgtgaaccttcaaatccgcagacatccgattgaaatgagacgaccactgcgaaaatattagtatagagttatcccagtagtatcgaaatcaacatacttcaggtccgaaggctttttcgggctccatttcagagccatcatcgtgtttaaacctcttgggcttaggttcatcatagtcttctgactcgttggtggctgctttcctcgcaatcaccattggcaaggtcttcggcagtgcgtcactggcaagtccaatccggaggttctgactgcccatgtgaatgacaatgaccttggagccagccatctcagctggggtctcctccgcatcctccatctgcgcgtcgccatctgcttcaccctcgccttccgcggtctcggtctttgccatagcgagggcacggtcatggtccttcgctttcttggtcatctttgtccttgcttcctcgttttggagtcgaaatgcgaggctttggtcatctcgtttcaggtagtcactgcatagcgtcaatcagcattgacgttcccaactaagaccatgcaatatatattggcctggatatgcgtacgtgtagtagttcttttggttaattgctggaatctgcggccagctggataactccatgttattgtcggtccgctccaggcctgtatcaagtattagctgctctgttgttgatgactgtatttttcacaagctatgtcagagtgtcttaccctcatcccggagggccttgcccgacttctttccaaccatgatggtatcgggttgtggtcggctgtcttcaatagagactaatcgcggcaaatctagggagtgcgccggaggtgattgcagttccctgattgcgctttaggtcgtgacaaacagtcctgtataatgcgataaaagggaacaagcccagaatataacagagggaaagagacaatgggggttttctaaatgaggagctcaatcccgcaagacgatgatcccccgattgaccgcccacaccgcacaggccgatcggccaaagaacatcaaggtggttgccaccagtgccttcttctctttcacctctatctcatctacttgtaccataacccctagcgagtttgtctcattccactcaatccataccacttacgcgcccctcaacctatcctcctcggccccgtacttgtccggacaacctgtgaacagtgtacaacgcgcccagttaaaacatacacacgatgggaggttcactatcgcgtatctggtccctgctctggtccaagaaggaaattcgcatcctgattctaggacttgtatgttgtgccttactgcgtccgacgcggggaaaccagggtcccactaatgtgacaaagactgaaactaattaatatttattgggatataggataacgctggaaagaccactttgctgtacagactcaaggtaagatatcatggctttgaaactttggttttctgtcgcgtttgagtgagattcgcgagctgacaccttgcgcccacagatcggtgaggtcgtcactacgatacctacaattggtttcaacgtcgaatcggtcacatataagaacctcaatctcaatgtctgggtatgttctacccagctccgagctcattctggccatacctaatatccctgggttgtaggatcttggtggccaaacttctatccgcccgtactggcgatgctactacgcgaacaccgccgcagtggtcttcgtcatcgactccacagatattgagcgattagggaccgcggcagatgaattagcagccatgctgaatgaggaggaacttcaggacgcggcattgctggtgtttgccaacaagcaagatcaacccggtgctaagggcgcaggcgagatctcagaggctttgaagctaggagagttgcgtgaccggaactggagtattgtcgcctgctctgccattgatggcaagggtattaatgagggaatggattggctggtggttcgtttctcttcccaatgcaatctactaggtccccaaaactaactatgcctctacgtgcagcaaacaatccagtccgagaatgcatgattttctggcgtttctatgtcgggtttagaatttcatctttgataccttggtcttcgagtttctcgcacaactcgaaggccttcagctgcattcggagtgctgtaccacttcttcccttcgactctgcctcacagagtccttgtcttatatcccttcatgattccgatgtcagacctgcggcttacacataattgtttaattgaattattgacgctgaattgtaaaagagaagaaagagaagtgtcaggtctattctatctgagtccgtaactattattgatatctctccggtctcacctgcctaacctgcccaaacgcgagatccttccaggtgtcccagttgatcttggcatctgctgtttctgcttatctttgcatcctccatatgtcgcctgtgcacacccccgcatctgcgatacgactaataccgatctgatcaaggtctcaactactgattcaagagtgtcctcaaaaggattcatttacttcctccagtgatctcgaatatccatagaaccaggaacatgtccctctccccaatccctttgattcaaatcgctgctgttatcacatccagtacttctgataccgtcaaggtggggatcaagagcaatcgcctggtgccaagaccaggaaaaggcgagatcctcatcaagctcgagttttctggggtatgtcactcggatcttcacagcatccgtggcgacacgcccatgttgactgatgtcgcgggtcatgaaggcgttgggaaagtagtcaagggtaagagctatcgctgtatcacgttgaatacggctcgggatccagaaagtatactaaactgacattttcgttatccttagtcggacccggagttgacgagaagcaatggatgggaatgcgggttggtatcaggtctgtctccttcattgcaaagtggtggtccggttgaagttatattgacgctggatgtatttccactattagatggctctacagctcttgtcgccagtgtgaaatctgtgacatcaaccataccgtatgcccttatcagaagaatgctggcgcagtaagttgtccatcacctcaaattatgtgtctcccgccatttcttccgttactgatcacattgatggtttccagaatgtacctggaaccttccaacgtaagtgttttacttatcagagcagtcatccagcccagtcgagcacttctaatgtcacctcccagagtatattgtcagtccagcactccatgtgacaaggattccggagcagctttcaccagatagtgccgcaccacttctatgcggtatgtgtttccgatatatatttcgccagtacaaatgctaatccccatctccagctggaattgcgatgtactcctctatcatgaagaccaagactcgcccgggagactaccttgccattcttggtgctggaggtggccttggtcatatgtacattccctacccagattttgatgactggacgctctttttctaatgaaggtatctctcacaggggaattcaaattgcagctaaaaagggccttaaggtcattgcgattgacaggtatttgacatttcaagttgaacctttctgtcacctttataacaggctaacctgattgtgcttctaaagcgggaataagaaaaagcaactatgcctttcgcttggggctacggaattcctggactaccgagaagtcaacattgtccaggcagtcaaagccaagacaaccttcggtgtacatgctgtgatctgcaccgccaacggcgagcgagcatacgaacaaagcatgcagatgttgcgtccttttggcacactggtctgcgtcggtattcccaacgagccattcaagctgccagctacaccattcgatatgattgtcaaaggtgggttctctggtacttgtgcattcaaagcatgaaccggtctgaccaactattacaggtcttaccattgtcggaaactccgcgggaacggcggatgagatggatgagatgttggctatggccgtggctggcgatgtgaaggcgcatattgaagtctttgggttggacgatatcaatgacgtgttggaccgtctggagcgctcggagattgatggcagagttgtcttgaggattcctcaataggtgcgatagttggcacttccgggtacctggggttcaaagaccttcctttccttgataggttctagccataaattgcatggttgccagcattattaggccttgggttttctaggcgggtatatatttctttgccttctttttttacatgttccagcaatgttcttccggagcaggtgtcgtattctgcacttaacatgtccccggcaactaatatatatttgcggacagtgcattaccaactattttgatttcagtccaaacttggttgtgttgacgaatgcctatccgaattccgaaaagaaaagatcgttaccccaaagcctgcaacctttttttcccaaataaaaaaaaagaatctagccaacttagccttgaaagactctagcagatggcaaaaggaaagaatcatggttccagagggggtaaccctcgactttggcgatattagcaccacactctaaccaactgagttatggaatccgttttgttctgtcgtcttgagctaaagagtgaatgataagggagaccgtccgatgtgcctggtccacatgggccgtgggaatactccaccgtcggtaaaatggcaagttagggcaggatattacagcctggcaactctagtcgtcaagttgcatagaatgtaagccaatgcagccatcggtatatgtcgttaatgattagttccccaaaatacaaaagacgttcatgtggtagtatattcatcgcatatggacgctgatagctacctaggtagccgttttgggactagcgaggacgacttggccaggtggatcacgcacacttccctcatgattcacattttcgctcgacaaacacaataaaacgggttccataactcagttggttagagtgtggtgctaataacgccaaagtcgagggttcgaccccctctggaaccatcatccgactgtccaggttaacctggtcattcgtttttttttggctctcatcagatatccttgcataactagccctctttcaatttttgttttataggtctgcggagaaccggaccttccctggttacctaattaacatagttggaatgcacatgaatagttgtattcggatatttgaagataagtaggatatacatagttaggaatcgactggctcatgtaaggtcatggatatctcctcttcccatgggcatattctgaatcgaagtaaaaatgagataaccaaagccatttttcgccagcacattctcattccacttacatcatgtcagactatgctgtctaggaggtttgggaagacatattctgtgttgaggaatagagcactaagcccaatacgagctcgagctcgtgatgatgaagagaagataaccagtcaataagtttcgttcattctgcatataaagcctagacatccttcgagatgtaatgttccgaagcaccttgtaatcgtcaataatcatcaaaatcataaagacgaagaaatgaagtagacgagtcaggtgaacattcgatggtattgtaagggtaccgcctacaagatattaattctgcgggacatatgcacaccgcccggattgtgcagcaaagaacccgaatccgccctcgagaactgcaagggatgtgcgagaacctcggatcgtgctcaattgcaattgtaagtatttgattaggtggatattgctcccctgtataccatcccaattggctagtttccaatgcgagtcgattggagcttgactagctccacggccccagtcacaatacactatcaatcgcaagtactaatcgccgtataggttcgatcgggcgttgctccgccggcgaagataattagctccacacgcaataaaaatggcttgtaattccgcaacaatagcctggagagccagcgtccgggctcgtgcccttcctacctgccgtttgacccaacggccgtcggcatttctcccgaaacggacccagcgctaccccggtgcttcgagatatgcttcggactcagctccatctgcaccctccgaggcagccaaggagacagcgaaggatgctacaaaggaggccaccaaggaaatcccccgcaaagcgggccgtggctccaagaaggccttgtacggtgcctcattggccttgactctgctagtgggctacatctatggaaccgacaccagagccagtatccacagatacggcgttgtgccattgatccgcctcctgtggcccgacgcggaggatgcgcaccacatcggtgttgagaacctgaagatgctctaccagtatggtcttcacccgcgcgagcgtggcgagccggatcgtgatggtgccctggcaacggaggtaatggcattcaaaatccgtcgatagccaatcactgacgaggtccgataccaggtctttggatacaccctctccaaccccatcggtatctccgccggtctggacaagcacgccgacgtccccgatgcactgttcgacatcggccccgccatcgtggaggtaggcggcaccacccctctgccacaggaaggcaacccgaagccacgagtgttccgactgccctctcaacacgccatgatcaaccgttacggtctcaactccaagggcgccgaccacatggccaaggtgctgaagcagcgcgtagctgactttgcctacgccgccggattcggcatgcacgaggaatccgagcagcgcgtcttggatggcgaagccaacgtcccgcccggaagtctggtcccgggcaagcttctcgcggtgcaagttgccaagaacaagctcacacccgacggagacatcgaagccatcaagcgcgactacgtctactgcgttgaccgagtagcgcggtacgccgatatcctcgtcgtgaacgtctctagccccaacacccccggcctgcgcgacctccaagccgccgctcccctcacagcaatcctgacggcggtcgttgcctcagccaagaacgtcgagcgcaagaccaagccctacgtcatggtcaaggtaagcccggatgaggactctaacgagcagatctccggcatctgcgaggctgtctggaactccggcgtcgacggcgtcatcgtcggcaacactaccaaccgtcgacccaaccccgtgcctaagggctttatcctccccgaggaggaacagaagaccctgaaagaaaccggcggttactccggcccccagctgttcgaccgctccgttgcgctcgtcgcccgttaccgcgccctgcttgaccagggacccccttctgcggccgactcggataagtctgtcgagaaggcgtctgagcttccgcgtaaggtcatctttgcttctggcggtataactactggtaaggaggcgcgtgaggcgctcaaggccggtgcttcggttgctatgatgtacactggtgttgtctacggtggtgttggcactgtcacgcgtgtcaagcaggagctgcgcgaggagctgcagaagaaataagcggagcggactatggattttctttttttattcttctcattcggtctttgatagatcctgtaaataacgtggatatgaacaagcaaagtaatattctgcattccttgcttccccttattcgtagtcggtttgtacgtcgtggtcaacccattttctgctgacaagtcccatcctgatgagaagaagatccactaccctggtactccatcggcgatagaatcgtgtggactatttttatgagtccagcaaattcttcctatgaaaaccgatattcaatcactcataggtgcagagtgtcttcacttcggatgccgaaggtgaattcatggacactcttccaagggacttttaattctcctgcggctttgagcctgtggggtgcttggatcggtacacataagatcgaagtcaggtaccccagcggtacggagccctacagttttgaaatcagcaaatgctataggtcgctgccgggccttcaggactgctccaacaacctggcccaccgattgttggaagcggccctggaggccttttccatcaccgacgaagaccctctcttcgtgaatatcgctagacgcaagctggcgatccacgttcttccttgacgatggttgattcacgtagaagtcgtggacatcgagaagggaattctgccactcctgtaacagcccaaataaacctggtcctagttaaagcagaggagcttgtgcgatcctcgtcggcgagcagggaatggagagcagtgcacagagcatgcccttcgccgttaggttgaccattgtgcagatcagaggtaatgtgaggggatgacaggagatgagaggtaaaagtgagcctcacaagtctggagattgtcgatatattgccgtgtcaagtcctctagttcgatccctccctgttaggggtgatatcgccacaaagcactcctctcacttgctgcagatttaacgtcaaagaaccgacgtggcatatcggcaaccacggtgattttctttgagggttttggatggctggtcgggacagatctaggacgacaagccattgggtcgttggcttccctgacactgacttgagagactgctctgctctgcatcgtattgcagcaacggcgcctctctgagccttttgtccacataggcggcaagtttatcctcaactgaaccatggtaggcgatccgggcgtgactatagtataagcgaaatagttgaatctttcaagtgaaggaaggtgcaaaatggtctttaccattccttgtgggtcggtaggcttgttctgaaccccgccgctcaaaggaggcgacaatattagaaggctttggacggttgttggcagcagaacgggagaagtgctgaacgacgcagccgtctggaagattgctcataatagaagatgaagaagaggctggtgtcttctttggtgtctttttggtatcttcatgggtggtaattgggccatttaacacagccaatccagactgacaccgcgcaagccatcaaagaaatggacatttctcggatccaacccatgcttccttcggaacaggctgttggggaatatttctggaaatatcgacagccgtattgtcattcacgtggcagacgaatccagtggactcgtggcccagctcgacactcgacacctcggccaaggagtcgatgggcaagggcgcggcaatcgcctgtgcatcctcgacccgagcacgagccaaagtcactcgagtgctggcaggggtttagagcagtcgttgatctgataggctgtggtatactgccatcatcaaagcgtctactcggcatcgggactttgcttcggtaaagacagaaagctcggttaaaaaagctttaaaagtcatttgagaggtaaatctctgatttgattcgtgtaactttgaatcttccctggatattttctgggtcttttggatcttagtgttgtagcgggttgttggacattaggtagattccagccttctttggaaggtccgttgtttacggcccctttaaagtcaggcataactcaagaatcaactctcaaaggcatttagcgctctgcacatccgcagggattatatgcataagcaacgaccgagtgaggcagtaccgaaattaatagaaaaaaaacatggaattgagaagtgtcggtaagaacaatgcgacctacatacatgtaggaatatccaaaatagctcggattactcgatcagtgcagaatggagctcgagaactccacaacgaacccacatcgagcaagtggacatagctccacggcctattgaaggtagaagctaaaaagctttaaaagtcatctgagaggtaaatctctgatcggcctcgtgacgggctgagaaaaccggggaagttcagtggagctgccggattcccccagataggcttcccgagaccccagccggttgagatgcccacttttttcggatcccgtgagcttttgtctagatgcatctgtttttcgctgttgaagttgaagctgtgttatgtattattccgtataacaatgacgaggaaccgtatagtgcgaaacacaataccgtatgtataattgtatagacacaccaaggtgtcaaggtgtcaaggtgtcaactttgaaggtgtcaaagcaaccttccaaggttggaaggatactagtacgggtgcgtaagcatgtagcgcaaacgcaacccaatacagcatcacttcagagccaacgtctcctccacctcacgaacaacctccctgacacctcgaatttcatgcgcgaacctgcccaaaaacatcccatcaacagcttgaccgagcccaccctccccccaaagacccggccccgcactgcccccatacaagacccgcgccgtacccgcccgatcaccaataacagcacggataccctgcacaacagcagcgacatgatcaacgcccgccggcttcggctggccaatagcccaaacaggctcgtaggcgaagataacgggcgcgtcgtcgggaatagcagccaagactgcgcgcaccagcaccgcgcactcagtcacagcctgcccgactgcttgcgaggcgatggggccggggcttgtgacttcgccgacgcagacgagcgggaccatgtgctgggcacaggctgcggctgcttttcgggcggtttggtcgtctgtttcgttgaagatggcgcggcgttcggcgtggcctagttcgacgatactgcagcccagtgcgcggattgaggctggggatacttcgcctgtgtaggcgccttggggttcccagaagcagtcttgtgcgccgaggaggaagggtggttgggatggggaggtggttgggaggttggccgagtactcttttaggatttgggagcagggccagatggttaggaagtcggggattagagctaggaggagtttgtctcggtttgctgggttgacgatctcgttggatgggttgaggaggtcgcggaggtaggtgagggtgcggtctggggtgaagtacatctttagagagatgaggaggagcttctccgggaggattgggtaaggggacgccatggtggtggtagtggtggtgatgggtgatgggaaagatgtgtgattgtcccggtgtttgggggatctagcgttcccgtctcggagatgtttggggtactcggataagttgctttggaaagttgaagcgagaattccaagtatttccaagtatttccaagtgattttgacttgggaaaggtaactaaattccatgtcaatgcgctgcattagcgggatttttacgttagacgttccgattgccccgtcaagtttagtgcgaaatgagagtctgcactatgtgctatgtactatgtacggagtacgcgacgtcacatcaggccagggggtatacaaagtaaaaaagaccacccggagtactcaatgccgggggtccaatgaatctggggccaagggaagtcaatatagtatcaattactctgtaccccggacacaatagaaagaaagaaactattccgagtatcgttatcgctttaaacttttgcctacaccttttgtacattttaaagtatctactacatcttcatctgtctataatatgattagaatacaatggacatatagtgcagatccaaacgaaaatccggagtacatcatacaatagtaccataacacagtagttcaatccggcgagccgggctaacttgaccaacaacatcggagatggtggagtgggaaagtggatgcgatgacacaatgcacgtcaattatggggttcccaaggttagcgtctgtgggggaataagtagagtaagtatgtagtacttcaaatctttggcagagttataatcaagtgaggcaattcatgttgatatccctgcattcttttcaggaattaattcaatgccatggaattggctgaagataaccttgcaagaagtcaatttcaataattcccctcttcccgtctgacgtccggggtcatagccgactggggtcatagccgtaaattccctgcctaggtaatatacgaggtgcccaggccttagccacaaaaccaatcctggggtcagggaaaaagaagatggaaccgagaatcccggcccttggcttggaggcaccagaattaaagagggaggttagacggtcatgccagtaaaaaaaaaaaggaaaaagagaaaaaagaaaagagaaaaaaaagccacagacgccttgtccgtcttgaaaggttcgtcctgacattgatggcttgagggtggcaacgtattggcgtgagttgcacaaggtgaagctttgtagtccaaagcgccagcgaggtttaataaaacatcccgtgtaatacgaggtaaaatgcctgtatgacccaagacaagactcctaaagtatccgacctcggttgaaccctccccctggaactgaccagtcatagtccatggttggggtgctatgatgctgtggacgggtcacccaagacgctggaaatacgcgtaacaatatctagagggccattcaagtcgcttggtggagatggatgatgataccatcaaatgcaaggattggctggacctgagtggtttccaagttggttgtacggtaaggaggggaagagtcgagagggaaaaagatataaagacccccttggtgtactcccaaatcaggatttcttttctatatcaaataacttccttatctcactcactctctctctataccattcgattctctatcgatcaatccatactcttgtacattcttcatcctcctgtccatacctccatcatgtccactcctttccgcattgtcatggcctgcgacgaggccggcgtcccatacaaggatgccatcaaggccaccctcgagaagaaccctctcgtcgccgagatcattgacgtcggtgtcaactcaacctccgataagaccgcctaccctcatcctgccgtcgaaggcgccaagctcatcatggatggcaaggctgaccgtggcctcttcatctgcggcactggtctgggtgttgccatcgctgccaacaaggtgcccggcatccgagctgtcactgcccacgatcccttctccgttgaacgctccatcctgagcaacgacgcccaagtcctgtgcatgggtcagcgtgtcatcggtgtcgaattggccaagaagctcgctaccgactggctcaactaccgcttcgaccccaagtctgcctctgctgccaaggtccaggctatcaccgactatgaggttcagttccgcactgctgcttaagattgtctttgtctcatctccccatgacacccgaaacacctgggatgtctggagaaaccccctggtattgtcgcccaacactgccaaccctccgactgagcatgactggtcatgtttcatcgactcgtctgcatgattgttatgcctttcttagttctcacagcgcatgataccacgaatcaaatgttacttccgtttccagattggattagaaggtcacatagatatgtatatagtgaatgaaataactatgctcaaacttcagaggaatctatagaagagtggctatatcatccggacctgcacacctgcgcagccaattgagctgactcagaccttctgcggggatctatgagtttccaaggttccatatacagttgtttcatgcgatttggatggactcacaaagatatccacaggtactcacacggtgattgcagatcaaaagcccttttaaatccccttagtcttcatgaactagaataatatccactcctatcactcctgactttatatggtggaccgccccacattagggaacagatcacagaagcccaaggcctcactcacacattagaccatggcccaagaactcaaagcaaagggcaacgagctcttcaaagccggcgactacatcggcgccgaagatttcttctcccaagcgtaagctatcacatccgacccttccgacccctccgacccctccgctcccctcagtcgcaaacccaacatccaaatattccccaactaactcctccattgtacagaatccaaaagaacccgcacgatgcaaccttcttcacaaaccgcgcagctacacgaaccaaactagccaaatgggccggcgtcgaacatgacgcccgcgccgcaatcgaaatctacggcctaaagaaccccgtcgccctaaagagccaatactacctcgcccaggccctcctcggcctgcaacgcccacaagaagcacacgacgtcgcgtccgacgcgtaccaacaaagtctagcagcgaagagtgcccagtcgaagaacctgtcgcaaaccgttttgcgcgcaaagcagcagatctgggctgcgcgcgagactgcgcgcgtgcgcgagctaaacgagacgctgggatctgtggaggcgctcgttgaggcggatgtgacgcgtgcgctggcggagttgcagggtcgtttggagcgcggggagatcggggaggtcgggtttggggaggatcagaaggcgttgcgcgaggatgcggatgctaagattaggaatttgagggaggcctttcgcgttgcttccaagggggagattcaggaaagggtatgttctggaattgttgggttttgggatgttgttgacgttggattgctttctaggttgtgcctgactatctcattgatggtatcacgtttgagatcatgcatgatcctgttattacaccgtcgggtgtcagtttcgatcgcttgggcatcacgaagtatgttgagaaggctggggttgatcctttgactcgggctcctatcagtgttcacgatttgcggaacaatcacgctttgaaatcggcttccgaggaatttctggcgaagaatggatgggccgtggactggtgattgctctgtctctttgagcttgtacattgcgggaatttcgacgttctttttctggtgcatagcgaagtctttccacagtggttgcatgtgggcatgcatctgttggcgtgtctttttaaaatattatgtaagtttttggatttaactattgaatatattgtgacagcttgggtttactctaaagctattatggtaaattcgtgcattacatagcaactagtagatgtataactacctagagtacactttttatataaaaagtgtacatgcccttaaaaccaactggcgagtgtgtcagcgaccccacctatctccgttgaccccgccctcaacatctccaaatatcccaaccatataaatcctctgctctttacttttacctctccttatacctaagaagaaaacctctaatccaacatgtccgacattacccccttcattaccgtcctggaggccgcccagaagaaagaaaagttcacccccgaggttcaagaagccgccgccggcatcgacgccgcagctctcaaagacatcttcgcgaaggtcgccgagcagggagagttcgagaagctcgatgatgccaccgaggccgagaccctccgcaaggccttcgagttcgccgccaaggctgttatgatgctgaagtcttcccccggtcttatggagaagaaggacctctacatctacttcaaggttggcaagggtgacgttatggagaagcctggcatgttcgatatccaggtatgtttagcttccacaggattgcgagctcgggaaagccccggactatagcacgtttcttttgaaggccggtagctgacaatgcattctttgcaacactacagaagaagcagctatacggtgcttgggagaaggtcaaggactacagtcctgctaaggctcaccagctctacatcggccacgtcaacgacttcattaccaagtacggcacccgcgacgaatagatgatacaattgggagaattgatcttggggaatgactggcgatttatcggacatattgtcgggtgatattttggaaacacgcttatctgaaagagaaagataatcgtattgtctcaaagctctcaggacgaataaacggatacaaatgcatgctactttccatgacccggtactcgcgtgcccagaattccatatactatatacactgagataaccatgcgatccacacccgtgaactgctgagacagaaaacagaaaacacccggtatagctaagactaaacaaaaagacagcagactcaatcaatccagctctccccccgccagtccggcagagcatgcgaagcagtcgcgcaccacggctcatcagccgcaccataaggcgtcaacggaagatcgtaaggcatccggaaccctacgaccacagaagccgtgtcagcgtcagacacaccaggacgatcccgcttgaagcaagggaccatcagcgcgtccggtacaggggctttcccttcggctcgggactcagacgcagattccgatgcagcatcagcacaacccccatcccggaaaagatccggccaaacaaccacgccaatctcccagctacaaatgcgcacctctccactcccattcgtcgccgcgccccacgcctgcgtggacagattcgccgacgacaccatcgcccagtcgatggtcttcatgtctgagtccgcgaagcggatgtaagtcttgatgtgtggagctgcgcgggcgcggcctgcttcgcgtcttggggggttttcttcggataggtcgatgcattggcctggggggagggaatcgcctgcccattggcagagatggggacgcatgtattgtagttgcttttgttgtgctgcgctttgggttttcatgtggattgagctgccggagttgtagccgtttaaggagcggcggatctcatctggggttgggaagattattgagtaggtggttggttgtggggtgagggatttgaagaagacctctttgagccacttgtttgtttggccgagggtcgctactgaagagatcttggatttgttggttgtttgtcacagtgaggtggttgtttggggatggatacgtacctggattactacgtggggtttcttgcttggggacttctgctggatgggtatttggctcatcaagtctttcagagcaggccagccccacagtgtgtcctcctccgagctggagtcactgacgtgctttttggatgggacactagcaatgagcgcagcgcgaatagagctgaagtcatagttatccagctgctggacaagcgggccggtctttttaggtccatatgccttcagataagcgagtaggtctcttttgaagcgcgcgcccgagccaattttgttgtctgcctgagagcctgctgtgtttgccttctgcaggggaagcagtggagagcaccaggcggcttgagtcatattggtccaatccatatggatcatgtttgccgtgtggatgataaccctgtttggccatttagtcagacctataagggctatagtgatcaataatatccggaagaaccttactgagctagatcatcatgccgaagaagaatcatcatcttggaatgatgtgtcccgaaaggctccggcatgtaggccacaataggctcaacattaggatatcgcgaacaggcttcctagtagcaggttagtctccaccatttgaaaccctcgagcagtgatgaggtgtagtcaaacagatgaagtcaacacgatcaaaagaagtcttgtcagtacgaacttacctcaactcgaatacggttcgaatcctccctccgccacgatccatgcacgactttgacttgtattagaccccggacatcctcatcaaactgcgacatgagaaaatccacatcaaagaggtagttaaactgccagcactcgcggatcatggggtctcccagaatatcgcgtagtcggatagtatcgacattattaccttccggtaaatctcggatatgcgtgagttttatcggtgaattgatgacctgggtagggcgggtagtgccttcagtgccaggagtcaatttaccatcagtcagttctggacagcctcgtggcaatggtggactaatggccctgtgtaaagacgccagaggtgtagacgatgcgccatcactggaatctaataagactctggctcttttggaagggcgctccattcaaatgtctcttgggggtggttgagttgatggaggttaaaggcggtcgagatgggcgatcacgagagacgcgatgatcgagtcaggtatatcaaaggtaatacatggaaaagcacactattctgttacatattataaaggaaaggatgtttcattggaattgaatctttcatatcattttacattttctatgattttcataattttagctgcttttgggactcacactgcccactagtcttggttcaatcaatacattcatttgctcatccttatactataatatctctgctctgacacaactcactcgcgagtcgcaagcttcttgatctccgccacaactgcatcagtgacctgcttcgtcgtggcgtcaccacccaagtcacgggtaagaatcccctgctcgcagacattctcaacacaagccaacagctgtctggaagcctcctcctcgccgagccaagcaagcatttccgcggccgtccagaatgtagccacagggttggagatacccatgccagtgatatcaaaagcggagccgtgaatgggctcgaacatactaggatactcccgtgtagggtcgaggttggaagtaggtgcgataccgatagatccagccagagaggcagcaagatcagagagaatatcagcgtgctagttgagcgttagtccacagacctagttgtacatcatttctcatttcgataactcaccaaattggtagcaacgatggtatccagactctcgggcttcagaaccatgcgagtagtcatagcatcaacaagcatcttatccacagtcacatcggggaaatcaaccgcaacaagctttgccacttcatcccaaaggaccatgccgttgcgttgcgcattactcttagtgaccacagtcaacagtttgcgcggccgcttctgagcagtctcaaaagcaaaccgcataatcctctccacgccatgacgggagaagatcgaaacttcagtcgcgacctcccacggctttccggcgtgcgagcgaccaccctgacccgcatactctccctcgctgttctcacggatgatcacccaatcaaggtcgttaggcccgcacttacgcaacggggactcggtgccacggaatacccgtgttgggcgcacgttcgcgtactgctggaatggctggcagatggcgagtctcagaccccacagggaaatatgatcggggacgtcttctcgtgtgtttagtatcatatcttcaaggtattggctgtgtctgcttaccgggtgcgccgacagcaccgaagaaaatcgcgtcgtgcttcttgagctcatcgagtccaccatctgggatgtatttgccggtctttttgtaggtctccgagctccaatcatagttcttgaactccaactggaacgtcctgagtgtgtcggccaaggcattcagtgctgtgataccagcattgatgacctctgggccaattccatcggctggaatagacgcgatactgtatgtcttaggggacatgatgatgttgtgataaagttgttcgaggtgggagacggcgtaagatgaattcagcgcgtgcgagagcctttaacggaaatcggatccaaacgcccatatctcagtctccacctgaaatctgccctaaacctatcgcatagcccctcatcgcgagctgagtcgactacaattgtcgcggggggtagacggagatgcaaatgtccgcgtttgtgttgtgctatagtgccccactcggagaaagacatgtccgcgtggggaacaagcctgacttgcatgccactcggtcgagagactccggatcctgcttaagaaacatcattgtaaaatagggtagtgaatgtttgtaattgttgcacagcattgcgaggttcaaattgaaagtccatccttccacaatgtcaattccccaagaagcagtacacagcgtcttgaatcatgttctaccccatattgaacgccatcttcaatgccagtcttcaacatcaacaacccggcgaccctttatcctaggcctgacaggcctccaaggcagcgggaaatcaacatggaccgatgcactcgtgaaagagctaagacaaagccacggcttcaacacaataaatttgtcactcgatgacctgtatcttgaccacgatgatctcgtccaactacgtgcagacaatccatccaacaaactagtccaaacacggggccaaccgggaacacatgacatagcccttgcgagctctttcttcgaaagcttacgcactggctcggagatacttatcccgtcattcgataagagcaagttcaatggcgagggtgggcggacacccaaagatacatggtaccgtgtcccagctggaacagcgatagacgttgttgtttttgaaggctggtgtgttggattccagccactggaggaaatgagtattcgacaacggtgggaggaagggccacagaagcagactgcactggaatatccaacggagactctgaaagaccatgccgttgaacacttgctggatgcgaacacgcagttacgcggttactgcgatctttttatgggaccccagcacttggatttcctcgttcatttggataccaatgacctggtcaatgtttatcggtggcggatgcagcaggaacatgctctccgggcgcggacgaatgaaagcatgacggatgaacaggtggtccagttcgtgaaagggtacatgccggcttatgaactgtatcttggccagttacgatggggatttttcggctcgaccgcttccaatgccgaaaacaagggccaattgcgagttgtcttggatcaggacaggacagtagttgatattgaattatataagtgaactgaattaaaagcgctggaacaatttccgtgcggaacatggctatcccacatatgcttcttatacactttgtatcggaaatcacaaaaagttgttgtgaatcatccatgggccatcggctacactccataaatcgttcatgagcatagatgatgaaaatggcaaagagtcttgaccagcaaaactcggattaaaagcagggtttccgtcagccatgttgccgaaaatgagaccagctgaagactgtccaccgagatagttctcagcagggtctagcgcttcggaaaagttaccgatattatcagatggtgagaaagcggcagtgtcgtagtttgttgcggggccaaggtcctgaacaggagagcgaattgatgattgaaacggatgaattccggcagagactggacgaccttgatatccattcggcgttgaagtttgaggtcgaactgacgagagacctacatctccaatctcattatttccatcctgaaccggcagtattcgtgatatccgtttatccgtcgatggtgtgggttgggcatggatatgagttgatctcccgccactgttgaatgttgcagtaggctcggattgctgtccactagatgtatatgtctcaaaagcagattccatgcctttgatcgcctcaatgcaggtctctggccagctactaccgcgcaatgataggttttccaaaatggcaatccccattctcgcatatttgagagctgtcggcgtagggaattcctcttcccacgcagcatacatcagaatgagacaggccatccaagttgaccatgtaaagcatggccaggagagcggagattccggttcagaggacatgtgctttttcaacgccgcaagtatagatcgagaagatccaatacaagtctgcaaagcgttcttgtactccgcactgagactttcagaggctaagagaggtcgattcagcgagatgatagcttcgtgtcttaggatggtcaggagtagctggtgatatggctgcaagattggctcttgctctagatcagtttctgcggcctcaccaatggagttcacatcgtcataaacttcattccaccattgtgctagttctccagtaacatgagccgcttcaacctggctggcgtgactgtggagaatggatttattacgaagttcaacaatcagacctcgaatccgtgcgaattttgcaagatgggacagtaagcgcaatctgcggtcgtcggggaattttggagttgttgaagaatgtctctctgcaccggggtagcacacgtcgatgtcgtcatctcgaatagagagcggaattccaagggcctgagaaaggtatctttcgagggaataaattgaccagaataatcgacaacggatatcagtttcttcactgttgaagcaagaaaagcgtcttggacaacgatgcaacccgaggtggaatgcagtacgggttatgacacctcctatccgggaggcggcattcaggcgcaaaagagaagtgagtgcgagttgagcggtaaatgctgattgtaacagcggcaagctagttggctcttcaaggaggctttgtacatcttgcatcacatgttgaatagatcgaaagaccaagactgaaggaacgggactgagcttcgatccagacgatgttctctgccgattatcaccaagagaaatggacactatggagcggagagtcatcaattccagtcggctggctgattcggcccctttttgactgactgtctccagagttttcaagactgtcggggcgtggaggcaagggaagattggatgccaattttcgaaataactccgtgtccactcaacaagatcttcgaaagcaaatgaggtatttggtgcataatttatttcctccctcgcccacagctcatccgagcgttgaataatacttccggaatttcgctgtagccggtcgtcttcccctggcactgaagttttgtcacggactcgtgtttggtctaagtctgccgaacgacgtgcgaaggcattataaacatgacggataaaatggattccacttgaacttccaaggaagctcgcggatccctcattttgagactctctcatgaatccaatttcgcgaggcgagggtcctgaggtactagcgccggagatgcgcttgtgtctcttggttgcgcgggaagaatatggccattcagacttattctccgcgaatcgcatgctggcgggtgaagccgaagacatcatgttgttttctcacattttctggaaaatcgagatattgaagtcaaggttccttggaagccatctgtggacaccccggggcccgtccactgggcacgggtaggttgttacgtcagcgataggcacagggctccagccagggctccaggcccaggtgcccacaggtggaatgctgggcagcttacagcccgaacatacctacaacatacctaggtaggtaggtaggtaggcacgatcctacctacatacatgtaggtggataatccaagaacttgccgcaatctcatacacttatgttagcactaaagtctcccgctcttctaacaagccgcctttgcaaaagctcaacgtatttaagccttctccaatgcacagtaatcccaggatcaaagcctcttttctattgcacaagcagcgtaatatcaagcaaccctctactacgtgtctgaaattaacaaaaccaacaattggatgcatcatcgcgaccaatccgcagaaattttgaacgacaaggtgattgatctcgctcagtcagagcaaaagcacaaaagcaaaagcattaactacatctttctattcattttagggttgtcctgcataaatatagtggccatcacgtgcctgccgattctgcccggatgtttcttactccgaagcttttaccaagcatcacccatacccatgaccatggtagcctgatgtcttgcatatctgcatgtgtattgtataacaataaaattaacgaatggcgcaactgcgatcgaagcggaaggcacctagtgctaccatgccaggtgtgaccagaataccccacatcaaaagcatagatcgactgactcgaggtgccatcagaagagaacctcaatccgatttcctgtgagctatgcagacagcgcaaatgcaaagtatgttttcacttgtaaggaactgtaagacaagttctgacctataaaatagtgtgatcgcagactgtaagatcaaacaagttatcaccgtttagttcgatagttggccttatttctaaccatctcgtcaagtccgttctgttcccaatgcgcaggggaagtatcgaaatgcatctaccccgagagtggtaaaaggcaagtatccaggcctatacatgcagggacccgcggggagctaactcattagcccagagggttaccgttgggatacttgaaccaattggaacagagactggcagagaccgagtcagccctttacggggctttgatgaccattcgttcaatgggacaagcaacagcagcgcaagccacagcaaagacggagacctcgctcaaacacaaggcagctcgcatggaagagtggtctcagctgcccctccgagaatggcccgatatgcagcgttggatgacggtcatgtccgaccggtttaccattgagcagccaagtgatgtgatttcagatccaccgggacatggctacacgattccgaggactcctccccatgatagattgcagactttgggagatccccattctgggcaactctcatatgcatggcaacctagagacaacacggtcagttcggggagatcatacgatgctcatcagtcccaccctggggtgatagcttcgtcggtatattttggacaccaggtcgcggtggaacctgagcccagcccgtcgtcatgtagttcccgagatggaataattaacgttgaggatgctgtcggtgtttcggtggatgcagatgcagatgcaggtgcatctgcaagagctggggtagagacggggttgagcaaggccgaggagctgtcacacaataatcccagcctttacttctagatcgacgagaccttgcttttaaattgacgtgtttgaacgtacaattatacaataatatggagacttcatctcgtccctcatggagccttccttatctgtaacagacaaatgtggagcattgatgcctgaggccataattttgtacaccacatcacgtgttgcctggaacctttttcattggatcaaatcgtggaaacaccgcctgggcagaataaaccccaaatgaatggctttgtcgactgaaagcaaggccaattcaaatacagcgaggagcactttagaatttacaatattcaatattcaatattcaatattcaatagaccatacttcacatccaacattactccaaacattgtacaacataggaccctagcgggtttcactctactccacacaattttcacagtggagtctgagatgaagggtttttaggactttaaacatcaatactccacagaaaatccaccagtccactcagataacaagcaatacaccatctcggtttggaaattctccaacctctccggactcgatcagctgcaggcaagcgctaggaagaccccttgacctgagttcttccagtcaaaccctctgattggaccctcttcctgtcttgatccgagccaaacaggtcacggagcacagactactttgagcgtagaacggatacaggttggtgaaacgcccgtgccttcagactaagagcccggacctgcatccgtttcaattagattgttctcggggtaatatggcatcatgatatattggtcacttgctacgagggatggaattattattcttgtgaccttgcagacttcaagggtgtttgatatggaatgacagcgcagataggacacgtcgaacacgtacacatttgcccgaaggcccgatggcccgatgacccctccatacccaggcacatatccgtcctagaagatgaccctggaggatggctggaatcaactcggagatatgggagttaccccttcctagagaataaattggggcgtagttcatataccgtagaaagaggcaaatgtccgaagtttggatgaaccactctgatcaagaacactgggccctagccaaattttgaaatattctagactgaaatactgaaatctggaaatctttgggctccatcctttgtcctgctactggccagcgcccaaatccttcaaacgttggtgtagcgcccatcctccccgtaagggaccccccccccccccccttctcactttcttcttccaacctccttgggattgtgtgtgcctttgttccttcattctctccttattattctattcttttaagtccttgatacaaagtgatctgagatcctggacccctttttcttcttttattcttattcttgacctctccgccaccattccttaacagaagagactgttgttcctctacattttgctgcgcgaaattcaaaagaggattcaacattcattttgtgcatttttatagaatttgaaattctacaactcacgatctgatactgatctgatactggacattccggttgatcttacattctttgcgtgatcgtcccaccacgcgagactcaaatacggatccgatcgcaaagagcgaccagattccaaaaaaaaaaaaaaaaaaaccaaaatctcacacattgcatgtgtaaaattataaatcaattcgcgaccccgccggaacgcaccgttgtcatattttgaacttgaccgaatctccgaatccgccatgtcaaacctcacaagagcattcacccggcgcaataagcgcccagaagtgtccgcacccatgccttaccgtggtgaaggacatgtgcgacttaactcggcaagtataaagcgcagcaatatatctggaccggtccagctcttgtccacaaccaacatgctagcctacaacgcacccgatctatcaatgagcggctcttcatctgcctcctcactaggatcgcccgacgactccgacatggccttctccccgcaaagctatgcgtcatctatgtcctcgcctgacgtctcccctcatgggagctctcccattgacgcaaacccatccacgtcgtatttccccaagcgcacggccacggtgacaagccacccgcgctcctccacgtcctcgtcaactacagatgctccactggtgcccaagcgggctctgtcccacaccaagcgctcacaccaggagcttgcccacaagcgctcggtctccaggatgtccccacctccgctgaacgccgcgcgcaacacaccgggcattcgtgcaacgcaggaattcttccaggccgagccgcatccattcgggaaagagctagagcaggtgaacgaggttgtagaggaatttgggggcctcaatatgctcgatgatgaagagcggattctatacgccaaggggctcaagaagttttctgtcgaggattatcttgtggaagttgaagaactgtacggcagcattttcgaggacacacgtggacctatgaccgcatcttggttctaatataattgctgtacccccggttgacccggggggtgctcaacgacacgagattgcggacttgcgaggactggatattccttcgctcggcccgccacgacgaccaactcttattctttctttcacgactactgccccttgtttttcacgataccatgggaggaccttctgttcccgcgttcaatcttgatttttttgaatttattcaggccgattttatcctattcttcccgtaatagacggtctctttttttatcgtcatttcattgatgcatcatttggggccaactgtttgatacaatcctctaacaaagccaacaaagtctttgtgaggatctggggtctttcaggggactttttcgggattctcatatggaatctcattgatgtttcatttggagtttcaagtatattccaatacacacgttcaaacaatgtcttcaagagtgaacaaaagtaaaatgcagagcatgatgtacaaaacgcgacccaggtggaatgaggacatgatgacataatccaatattacccaattaggcatagcgtagggctcaccgacacggtcacgggtgctccgctgggctccacaagtgaccgaaggaaaagaaggaaaaatttcgctttgctttgctttgggttcagcaactcgaccattctgtctgcatccgattttatctatctcaagcaactggacttccacggatgcagacagattgtcacctttttctcctattccaacctgtagcattagccccaagatctcgacgtgaaagagtgtcgtgtgcttggaccagtctttgataagcttcgacgttgaaatcgaaagtcaagaggatttgatttcagctagagtgcggagaagcaaatgtcgacacttgtttctgcctagaacctgttctacatcacttttccctcacattcggccatggtctcccttgccacgacttcacgcaacccggcgctaccgcccacacccacgctatctcgttccaagatgctgcccacttcctctccagccccgattctgaaaacctcgaaacccgctcccgtggtcgctggctcgaaacgcaagatgagcgaaatggacctccccctctccccgtcctcatcctcatcccaggccgatgacgcgacggaagcccttcccaagaagcgaccccgcgtgcagtttgatcaagatgtgaagatacatgatgatatatcgtcggagaaaagtctggcagtcgttcgggaagaggtccgcggggctatccaccgacatgtcacaatgtcagaaagcgagggctacgaccggatcaaagggatgttttctgctgatccgacgaagcaagatgatgacagcctgcttgcatatgaatcaccaacacacacatctttgaggaaccaccttcttggtctgatctcgcatgtcgcctccttagaccgttcctgcagcgggttggtccatgccgtcatcaacagcgagtggcttggacgggatgaagcctacgtgaagctgtacattcggttcctgggcaaccttgccgccgcacagggtaccttccttgttcctgtcttgaagatgttagccaccaatctcgcgtccgtccctcgagcagtcggtcgactgcctggttacgccgttgtgcaaccatccgaaatgcacactcgcgtccacatggcaatgcgccatgtgctgcaactcatcccggccggtagtggatcactctcccagattttgtctacacagttccccttcgactcagatccagctagcgcgagcatcgcctacacccgcaatctcatccaaatcatcagctatgccccagagcttcagtccgatatcctggctcttatcaccgaaaagcttgtcaaggtcgacgttgaaatccaggtcgatatggaggactttgaagaggaggtcggcgacgaaatcttagatgaggttgacgaggaggaagaagatgatgatgcctcggttgccagcgacgattcggaagatgacgacacgaagggggccaagaagatcaaggacaacattctcaaagtggatggaatgattgacatcctctttgaatacttttcgcccccgttcacctcgggcagcctggatgataaggagaatgcgttggatctgctcctcagccacttccaaacgatcattcttcctacatatcgatcccgccactcacagttcctcctgttccatttctcccaagcgtcacccgtactcatcgatcgcttcgcgtccacatttgtgcagcttatcttcaacaagctgcagcctggtatcctgcgccagtcagcagctgcatacctggccagctttgtcgcacgtggcgcgcatatctccggagaagtggtccgcgacgtcttcgacctcctcctcacacacctcaacagcctgcgtatggactatgagggcagctgccgcggtcctgatctccgtcgctatggacctttctactccaccgcacaggccctgctctacatcttctgtttccggtggcgcgatctgacaactgccgccattgatggtgatactgcggaccaggtagacgagcttgagccgggccagatcgcattcccccctaacatcaaagaattccttcacaaatgtatctattcgcgtctgaacccgctcaaggtatgctctccagctatcgtcgccgagttcgcccgcatcgcgcaccacttccaatttctatacgtctaccctctccttgagaccaacaagcgcatccgcgtcactgccttcaggaacctttccaatctctcagacccccgcttcagccacgtcggccgcgagatccgcgccggcgataacgtcggctatcaactggatgcatacttccccttcgatccttaccaacttccccgcagccgtcgctggctggaaggcgactacgtcgagtggcgcggtattccaggcctagacgacgcaaacgactcagacagcggagtcgacgagtccgatgatgaagagggcgaggattttaccgagactgatgaggagtgaattgggcatggtctatctttctcgaatcaggacttgatcttgtggtcgattattttgttacttcagcgtggcgttcgggatttccaccaatatctgcgatatttgatcttgttttcgttttcttccacaaaaagttcccgataccttatgactgatgatatcgttcttgagcacggagctatccggtggaatatctgggaacttcctgcgtgtactaccatagtgccgaatctagcttgttcgaaaatgggaaaataatctacatggaatttcctgggctcttctcacggtataataagcctgagtgccttagatttcgacttcgatactttccaaagttgatttccgggtctcttgcgcgactaggaggccttctgctgcattcggaatgctgtagcaattcttcccgtcgacgctgcctagcagagtagcaagcaagcaaacaccaccccgttgctgtttcggtcctgaagtggacgccgcggaaatcgctacgtagaggcatgatcaccgtgccaggtttaacaaactgaagctattcacatttcctgaatgggcaattctacggtccgggcgagtgtgtcagaaagactaggcaccacttttgcagagcctcatcgggtaggacatattgattcttcagaccaagtcgagatggatgatgagttctgaactccgaatcccagttctgagtgggcattctgttcgctgagcctgacactgatattcgttggattgaagagcaagagggcgtgttccctgacgaaataatacttgccctgttcaatagcggcgttcgaatcatgctctagtttctcgaaatattttggaacacacgttgcatctcctgggcctcctgtctgcttaggtcgcccatcgagctatagggatttcctgtcattctggagtatacgaaggctatccggttattttcaaaaccaaggtgctgtatctgttacctactacaactctagatcgcctccgaacttttatattcaaacgcatcgacttcctgggcactagtctgctagcggcagcggtagatgctactggtttaccaaggtggaaatcattctcgtgggtttcatggctgtcattctcattgcgcatcacgtctctcgttttcatgacaagtttctgttccagtgaagcttttattgctgaggagcccatttttgatccacgtgtccccgacgaccaaacgtgcttgcaagctacctagacgccaccgcaaagggtagctgtcgttggaacgtcaagcttttctacgggctctctagatttcgagctacatgtgatagaggaaagcgctaagggcgacatctagggagtgcaaaggaagaatccataaaacaataagcagcattaagtcacgcctcagcaccattatgattcttccagctgccggcataatgatgttggaccaatgaaggaccagtcacattctcattgccgtaatgattcgccgacgcagcgaacgaataccccggcaagatcaaaacatcctcgagcataacgggctctaaaaggttcgagatactcgccatatcgatcgtctcattgcgagccaattccaagctcttcaaaaccccgcgagtcaaccgcctcggccccgtaaagtcaatcacatcacccgtcatatccaaagtcaactcagaaaccggaacccgatactcctccgtcttctgacgaatcccatccataatatcatctataaccatcaacagatgcggcgaaccgggcgccgccatgatcgtccaactctcaaactgccgaataaaattctctccccagccaacatcaaactcccaccccacaacaagaccagccttagcgcgcagcgtctcagggatccattctctaatgggtacatcaccacacgagacatcaagatcagcccagatgccgccttccgcgaaaagaagcaggtagcggaggaaatctgctttcagtatcggcaccggtagagaaaggtaggcgtcgacgatatcgggacgatggccgtagttctgttgcacgtattgatcgcccgtgtcgtcggtcatgatctgcgcgcgatgggctgggtttttgtggagacaatcgtgcagcaatgcgtgtgactggtcgcttaagcctttcgggccaactttgtaccagatcttctctgggatccgcggtgatgccggttggaacccttctctggatggattatatgtgaaggggccttctggtgtcacttgtcttgtggggtggtaatagaggatgaagaagagacatagtaggatgaatatgcttgccgttgagaatctggtggatgtcggcccctgagcgagcatagcgacggtgtatacgaagaagaaaggatttaagaggaataatacacaacgctatcaagcgccgtgggcttggtgggttaaggctgagagactgagactttcatcgcgatatagctttcccctgacttttttttttaacaataaaaataaaaagcactattttaagtgagacctcattttataaggaccctcaaaagtcccagttcacccactagatcgcttgggaaattgaaagtggtcgcttcgattggttggataagcttggcagattaatctccacctatagccctggagttggattcattctctttatttgcactagtgttttgaggctgttttgtggagggtctggaatgtctgacttctgatcggatttcttttctattcccggaattgcttcaaactgtctgttattttcttttctattcatgatggacgtggccagtcgatactcatctgccatgatatatagacactatatctcgataaaaacatacccaagtaggtcttcggccttagactccgttccatggatcgaggtctcggcatccattggctcccgagatgccaagatcgttccccagggcatttcaaaggttcatgttcagatcaagtacatatatactaagggtatgtatgtaaatgttcaggtcaagtgtccatcatttagtttcacggaaacgcgggacactcgtcggattgtgatgttggtgtatcaggcagatactctgtttcaacagatgtctatacgtaactatagatagtagagtggacagagctttacaggagcggaatgagacaggaagtatatagagtagagcgagcgaataaggagacgaaacaagaagtaaccaattagaaaactgtctagctaagaagccaaagaaaatttgctattcataattcatgggctggacactcaagtagggacagaatgttgagatttcgaagagttgtacctgttcatcctaggtacatctctacagggaaatcgtggtacatctggtagttcaagtcattactccactccaagacgaagcacttgacaagagcgatgacagtcatcgggtcaaggattggagaatcggatatgggagctgtatccctccaaaacctcgtctcatcaagagctgagactggaccgcccgatagaaccgctgctatctcagtcacaattctgacaacatctcctgaattcccctggcccgccataacagcacttgctgccatagccgccatatcttccctcacaaaacgcgggtcccatcccctggcttccaatctttccggccatttcgctaccgcaagacggagtgtctctgccaaccggtttcggtagcggtacatcctttcccttgcaaaagcaacgaggatatcacgtagccctcgatgaatcgaccatgacaggaatgtccaaggaagtttatccaaggcttcattgagaacggccgcttcttgcttggggacgtacagagtcacgtcgcgcatatcagagtctttgttgggtaagttaagagctaccatatcttctgacgattctatttctgcgttggtcgctttcatggccaagaagtccacctcgctcactttgccgccgagcatgttgtaaagatgtcttccgccgtgtgcaccgccaaatcctttgggtgcatattcaagaatccatttcccggatgatttgcgtcccggaaaagcacacttgaatgtatttgacgagtgtgactcaaccaccccagccagcatctgtaaacacttatcgactctctgctgaaactttgccgggtatgggtccttcaataatgtgtgagaatcatgcgcacaaaagtacacacgtgcaaggtctccaatgggccattccactcgccattgtccgcagtaggatgcataggcagctcgatggccagaagcgctgctgtaccagaataccggtcgcgcattcgttatgcagaatagtgttataagagttgcacgcgaaatcacagtgcaagtggtcaacttgtgcctcgtaagaggacgaagaggcatgtcagcccagctttcgcttggaggggaccggaaaggctcgttcgtaatagtgactatgtggtcaagcaccacagtaccatgggtggagagtttgttggtttgagaacctgggtgaatcactgcaagtagcaccgaccatgctgcctggcctactgggtgtgatgataatggcaagcgactgacatataccagattgttaccacagagcccgtgcaagaggtttgcgctgataacaggcccaatagggggtggcttgacaatatgataccatggtatatggggttgtcggagccaccagctgcctagatgccgcatgccccgcacatcacggaattcgtctgtccgatcgacaatggcgccgaaccgagtagcgatagattcaagaccgacgaatgttacagctaaagaaagccaagtagcgaccgaagatgaaacgtccattgcgttgttggctgatcgacttgaaatccacagggatgaatggaatacaatttgacgccaatccgctttctggaacaaagggaagaggtaaataggacgttatcagatcgttgctgtttgggctggtatgaataatataatgccgtactcagctctctaccggcagttccattattatattgcaataagtaaagcaggggaccgaaatgtagaccggctatgtatttgatcactaaacgaggcgctaatctaatgcaagtgcgcccagagatatccagtcacttgttcccctcctacatcaatgtacattaagcctagcggcggctaaacagctaaaccctaaaacctccgtgtttcagctcgctcgatgcacacttattaactcagtgaaattacggacgggcccgcaggggctgatagccgccattattttcacttattgactacatcagaaattcaccttgagggtgaaggtgttctgccaagaagtataaaataaacaatacactacctaggtacctaggtaggaaccaacccacccatggatagatgctgtgggccctcatggacataaggttagattcttcccagggtaaacgtgcgatcatcctgagtactgtatttaccaaaagggactcggagacacgtagttaatcatcaccattacatacctaggtaggtagttgcacagataaaataggaaagcacatagcgaggcttgattttggcaagaactagtctggagggataatattcgctcttccctttactgtaattcacgtcgcctgaccaacaggaactgaccccgagaactatattcagaaagctcgataacaaggaaagaacacttttacactgatctagaagattttgagaacacaagtgggtgcaccttcccttatttaaactattatccttcttatcattataacacaacttccttccagggttgctgccactgcctaagtggccttctacacttcgttaccttccgtcaacatacgctcgacctataaccttcaaaatatggtggttgataagctgccttgctcagtgccatggttggtgcttggtattacggtgttcctctttctgcttggctttgcgattggctgcattgcgcgcatcgtgcagatgttgatagaagcgatgatatcattgatctgttagagaaaatggcagctaggttacactgatattcgaaatcagatttacttttactctctttaattcccaaagcccctaaacaatactaaggttgtatctttccgccagccttgacgaacgtgatagatcaaggtatctcacttaggcgctgaaatttatagatcggtgcctgtattgaactcattatggagacgtaaaacaacttctcccttcccgatcggtctctcaaggccagcaatgaaactctcaaagatctcattcgtcacaaaaaattgtaaaaatcccacattagctattcactaaaagcttgcccctagatttttgcttcacttaccggccattccgcaagtcattactatctgttcggcatagaaaagggccgagcgcctcgggcgtatcgaaactaagagttgatcctgccatttccccaagctacacgacgaacacacttatattaggtttcccttgcccatcataagagctgaaatgtaatatggaggttcaatctctggcgagcttgtgaggagcgagagattatgctatcctgggtctagcctcactacatgaggatgtgactcacacaggatactacctacttaggtagtcatggagagaaagccctctgattataaatgcagcaagacctccagggctccagggctaattgtggaggtgcaccgaaactaagcccctcattgggcaaccgataccggaggcctgtcacctaccccacaacgcgcttacgcgcttcgtgtcactcccgaggtctcagcgcattgcgaatctccttcctcttctacccaagtgcaacagctaatttcaattgccagatgtgagtttcgacttctcacgcgcatcaatcacagtcaagctaaaaaaagggaacgcagtcttagcagtactagcgcgaccatcaaaatcatgggcgagaataaccccaaaccgcatgcctccaaaggtacggatcgacagggcaatctgaaactcaatgtcttcagcctgataacaattctcagtttggaccacgctcataacaaatactgcgtacctctctggtcttctgactcttgagtactctctcaggagggtggggtcaaagtatccgcttgtcgttctctacacggactcgttccccgccgagggtcacaaagcacttgattcccgaaatatcttgaagcggcatgtaccgtatcttcttccgtcagttccgaaggactacaccaacgatgtacgattttacgactgttggagcaaactcacaccgttctcactcgttgaatatgaccgtgttgtacaactcgatagtgacatgctggtcctccaaaatatggatgaattaatggatatcgacttggatccgccggaaatggctgggaacggaaatcgagtctttgccgctagccatgcctgtacctgcaatccgcttcataaacctcactatccaacagactggtaagaccaacctctcccccaacagatcttgggaatcattcaagtgcgaatgacagcatagctaatctgagaatcctgaaagggttcccgccaattgtgcctatagtatgcagcacgataatcctgacgttgcgcaagcaaccggtgcttcacccattgcaggactggggatacccaatgggggcctacaggtggtgagcccagctcaagcaatctacgacaaaattcttggacagcttgccacatctacaacatccagttatgattttgctgatcagtcccttctcggtgatctattttatggtcgctgggttgcactcccgtatatttacaacgcactcaaaaccctacggtgggaaggtgtccatgacgccatatggcgcgatgagaatgttaagaatgtacattacatcctgagcccgaagccatgggatgaatctggaccgagcaaagacccatcgcatgcatggtggacaagcttgaatgagaaaaggttgggcgaggagcaagagacaggcgtaagggaccaattctgacctgtctgtttaagaatctcacactatccttgatttgttgcattcgatattcgtccatggatatgcaccaaatacctcattcggtgggtacttcctgggacatatattattattgcattctgagtcgaccaaggtattttcaataccaagacgctgttgccaaaaagcggcgtcctcacattttgctgcgcctttgtcatagcgtagcggtggaaagaatcacgaattacttgctgtatatcgagaacgctgtcgccactgtgcaccatagtggaaaaccaatgtaggaatgagagcaaggaccaggccgagacctccaagcatagaaaagcctccccggtacccaagcctctcagtcagatgcgatactgaaagcggcaagaacgccccagctaagcatctcattgatatgaggccagccatcgcagatgccgaataaatcccacatgcatccacaatgtacgccgtcaaaggggagaaggccagcatcacagaagcacgaagccataccatcgagaagacaagcacacataagggcagcctgtattcagcgcaccatccatacagaatcaccgcaggggggagagtcaaggctccaatgatgctgagcggtaggcggtattcgggcagaccatctccgttacttcgcgcgcggagtttcacgtatattttatccaataagactttcgatattataaaactgatgatggtgccaatggctaaaatatctcgttagtccaagacatcaagagggcaactgcagcaaactcaccatttgcaatgaaaacaagacctgtttcagtcggcgacagtccataaatattttccaagatctccggaagtgttgtggctacaatgtagaaatgcgagaacatgtaagacccaaacaataagagagccaccaggacactcgagttgagtaaaactaccgctgggcgcatgatcgagtgtcccaaactggccaagtccactgcagggcgcatgctcttctcggacccgatttcaagagtcagccgagccgccctccggcgcaggatctggaccttatatgtttcttggaaggaggttaagaacaagatctggcaaatgctggccatcacaacactaatccaaatgatagcgcgccatcctagagtctgcaagacagcaccgctaataattggacccagggtaccgccaatgaggggtgtgaacattatcagagtaagcgcagtgcccctttgctcaggaacgaacatgtcgccaataatggcagggctcagcacgttggacgctaccgagatccccgttagagcgcgtgagacgataagcagttctgtactgggcgataaagcggcgaacaggatagccacaataaacatcgtgttcatagtcaggtagaggcgatagcgtccaaatatctcagatagcggtgcgatgaaaaggggacctactgcctcgcctagctcccatatcgtgacgagcataacggtggcagatttagcccctttgctaccgttgagatcatcaaccacatggcctgctataggggctaaggagatgcatgtgaatgtgctggatatgattagcttcaagtaggtatttctgcagggctttcgatacgtacactgtgaagcccatgaaggatagcaaggccacgaccccccatttgtaggagccaggccactcgagtggattttctgggtccccctttcggtcaaagtccaccgtgtctcgtgagtactcgagactactgcgatattcatcttctgattcgagcaataaaggattggcctcttctatgtcgggagagtcgggcatttcatcggtttctttgggatggaaatacgcttgcagtatgacgaagggaaatggcgccgagggggtccctaattattcgcgtcatctgaagaatgatcgtctgagatttatactcccgttgtggcgggctgagagccttcaggtatgtatgcaagggatatgtgatctgcaacagtgcttatatcggcgtagatcatatatattttgttcgattagtatttagatgtagtgagagcacaaaagcttagcttacaaaatatacactagtaactatacgaagtgatagttatccatctattcaaaatatacagctcagcgctcggtctccgcaactgaatgctcaagatcggggacctttcttttcccgatacgaagtttcttccgaagattcaaagctctcacacggtatgcccgctttcgcctccgtgggggatagttgactgggctctcgccgccagtaaagatagccatgtcatagagcaaggcaccaaacaatgcaccggtgatgtctgcaacccatggaccccaaatccaccatgcatggtattctcggaagacctgcccaccccatccagccatgagggcaacaagtcgcggtccgaagtctcttgcgcagttgaaacaactataaagagaccaacagttagtttcaaacgtgcttggaattgggaagtaccaatcggacacataccctccagtattatacccaagcgcaaggatcacaattgaaatgataatcccgataataaatgcctgcattcccgcccctggaggcgcgtttgtgtcatctcccagagcgagaatagaaccaactaggattgcactgcccacaaactcagtgaagaacgcagtcgcagggcggacgaatggtttaggcaaagtgaggagagcctgagcggcgacgcttgcattctgaggtactttggccaagttcgcgacttcaacaatggcgtcatggtagagcgcgtatgatatacctcctgcggtgatagcaccgagaagttgcgcagcgatgtagattacacatcgacgcgcggggaatccacgaaatactgacagtgagattgtgatggctgggtttaaatgtccaccagacataccaccagtagtgtagatggcggccataaatccaaagccccaggcgacactttgagcagggtatgacccggcttggctagaggacgtgaagttcgataaggtggcgcaaagaccaattgtcattgccatagttgtctgcgaaagataatcattagcaaatccattgtcagattctttttccggccagatcgagaactcaccccgagccattcggccagcggctcacgaagatagtgacgaattttcgaccaagtattgaaaaagccgtcttctttgggatcgttgaccctcttcattcgcctttctaccgaccgcagtttccgaacctcatccgcctgcgctagatcctggtcgctctctttcatatcgccttcatcttcccttcgatcctctggcaaggcgccatgacgcatgccaggccggacaatatgagggaatggctgagccaaactccaggtcggttcatcgtcgcttttgccatactggggattgtactgcttgtactcttcgtctgcatatcctcggttgttgtttggattctgggcgcccgagcccgccaaactatatgaggggatgttgcccatgccatcattcttgcttcctttttcttcggtgcctcctggttgttcgcgttcgggtgtttccacggtatctattgctatattagtcttatttatttttagcgatttcttcaaaccttttatcatacctttcactccggcatcccggccaggttcccttaaggatgccatcgcaacaacaatgtcaaaaataacaaagagtaaaatcacgtacgacgaattcagcaaataaaactagggaaagttagaataatcagtgtggaatgtcatgatcgctttttatgttgtaaacgatcctcgccaaaagcttgattccagcccggaaaagataccagctccactatttcgtcaccgttcatcctgacttaacatgacattcaccagggaaatgtattcgattccaaggaaagaaatggtctttcatgtagacaacgtttggcgggtgccatgccgcatatcaagaagtcggcatgcttaagaattgttgtttctgcgatatcctgcatgccaatccaggctctacgccagtctctaaccactgcgccaccgcagattttgccctgtagtttatgagtattctatatttcgaatacatcaatatccatggatcacaaatttgattcttacaatatttgaattcccaaccttggaatgtctaaaccttcttatatgccattccgtatacttcaattctctatattctacgtttcgatactataactttatatttaaccatagcagcttactagttgcatataaatatagagtaatagtaagctcaatgtctagaacatccagccctttgcctctgtccctgacccgctgggaaacttgattacacccgctgaaagccaacatttaacatggtcatatgaattcccgagctccccctcccaaccgtccacccgtccttctgtgtccggccgaaaaagactatgataatggccacgcaccgccgtcaatgggtagtctccagctcctggggcggtttataggccgagagttcactgggagggctatgaagcggtgtctgcccctgcatatttcggtatgccgccgtttccgcaacctgggattggagtccctccaccatagcctgaacagagagacgttttctccgttcgaatagcgcccagatcagcgcagtcagaagcagcactcctagggggactcctaccccagctccgatcgcaacatcattgtccttcttcgcatcgctgcttaacgttgtgtttgaatttgatgtggagttcgagccagtatcactagaagtgtaattggcgagcgcagccttgtccgtaatcaactctgcgttatcgagcgtaaagggagaacctgcgagacaagcggtgtctcccgttgaattgaccgtgaccgagtcggcgcaatagtaaggttctttgtcgatataacgataaagcggcagcgcgcaccctgagttgcgcctctcggtagctggagtcagaaaaatggctgttagctttgggaatttgaatttatgagatctgcttaccaccagagcacttatcgtcgcatgcgccatttgctggccagtttttattggtgcagctacctcgactcagcgtatatggttgtgagagtccatagcaaaacccattggtgaggcaaagcgagtttttggagcaacatggtgagtctgcatcacccgagaaacaggggacatcgtcgatcgcaacatctccgctagggaagtagcaggtcttgtccgctacgactaggtagacaaatattaagaggtggagaagtgtacggggcaccatggcgagataagggatattgaagcaggtgggtaaggaatcctttcaatcccattgaaaaggaaaaggaggaagaaaaatcgatagagctgcagaaacaaatccttcacttcgaagatcctggcgctagttacgtacttaggccgggtcttaatatgcttgcaataggaagattttggactgcgaaaactaggatactataagtccgaacagcataaaatagggtgtctacagtctacattattcctataactaaaaatgcctataaaaaggagagataaccatgtttatacatctttgatgtattggagtactctggaccagaaagtgaccagttcacagtgtgggggaagcaagtgcgggacgggaacgagtctgcgaggccaatgcgcctacgaaaaaagaaaaaaaaaaggagaagagggcagattgttggcatacatgcatacatgcaatgcatgtagggtatgcgtttgtctctgtgtgcagactgagctctctctacaacatatcacgccacttctctacatacctaggtacaaaataggttgaaccttggaaatattctcaattcttcaaattctctatattctgctcgagagagaccctgaccgtctatttaatcctagagcttactaataatgtatggtttatgcccaggtgatcgacataataatacggcccggtccttgaaaagcctatatcagcttatatggacataccagcttttagcatgccgtagtagccctacatttcttggatgaaagctaaaatatatttatgacagatggtgtcccttcaagttcctattcccgtttgcgacgttttgctggatctctgtcgtaacacagatgtgatttcattgctcctcgaccgaagtcactccgcctcgcacatccaattgtaaaatgttttcttggctttcactccctcgcgcaggccgttggtgcttcgtaaaccttagctcaatgggaacatagccaaggttttctcgttcattctgagaagagcctctgaaaagcgatggaaacacagaacttagcggccggcgcatcatagggaggcatgcacagattatccccgtattgcactcaacgagagtccagattaagcgaggagaatgaaatcccctacatccaaaaccttgttagcagttgttctctgattcctctctttttttagagactttcaagatactcacagctctggtctaagccagtcgacatttgagatactgcaactgtacggattacactagtgacacagacactgcatgtattcaagattatcacacattagaccgttggtcaatgggaaggcaagaaggataagacgatttgttatcaacttgagacagtagccggtccttgccaagtaatctaagacccggatggccaatagcttgttggtttactaggcgagaacagggtattcctaaattgaatcacggcagaacgaatatggctgggttctacaggctacagagtatgccagccccacttggcccttcaggggatgtcctgccatgcatgagaaagcagaatgcgagtgccgttctcgccgccgctagtgcattgaaggttccgacttcaaaccctgcgaggaaggcaccggctttccagccaactgtggacgacgtgactgtgtttgagaatcacattcttctttcgcagcaggggaaattcgcccgcattgtgagtggactctcctagacctcgaacatactcgatgggtctatgtagctgctaactagcaccttgcccaaaagcagccctatttggtcggacacaacgccaatgaagcgggattctacaagatcgcgacctacgcccagggatcgacattgacagctaagcagtgggatgacttcaatatgcaaacgttcttctgtccatccaatctcgaagcagcacaccggagtcgccgacatacaccagtttggcgattccaatacaacgcagacttggagaatacccgtctttaccccactagtggagcataccatggggtcaagtttaatattatttttggagcatctgctgatactactgggattgcggagtctgatgcccagcgccagctgcaggatcagatgcgttcggcttgggggtcattcattgctgatccccaacccggattggaagcccttggatggccaatttataatcctgaaggtgatttcacacgggtctgatggagatgatttgtgttaacattcttccagcttcgacccttgttgaaatcggtctggataatcattccagcgtgtctttcgtggacacgaggaactccgctcagcggtgtgcagatttgctagcgcattatactactagaaagacggctacatctacgctatatgcatacaatatgatcaggctgataaagtgacagtgaagtaatcatataaaagcaacgctatgaatgccagtggttcgaacgccaaagtcaagtcccctagtgctgagaagctaagaataatacatggaaagtcaagaaaaccaatcaccggtcgaagatagccttcatatcagcacaggcatcgcggtataagatgtccacgctgttttggtcccgccacggattgggtgacttatcccacgcatgtcgggctttctcgattagcatggcacgcgggcgtttaccgaggttttctaagcggcgaacgaaggattggccctccttcatcaacatatcccactcgcagataaataaaaacacgtcgcggggaagagcttcagccaggacacggtcagatgcgtggatgggagaggcgtagggggagacacgatcttccaaattaggaagataggcctcatcaaagagggtagtgaaaaatgcagggagggtcttgtccggcatcagactcatagcacgacggtggtcgcgagattcctcgaagtcgagaatcgggtaccaagcaaagagagcaacaatgttgagatcgctgacctggttgagaagattttgtgtagattcggcccgacccaggtgttccttcacttccgtggatactctaccacgcagtcgcaagggcaccgtgacagccaggttgccgcctgccgagaacccgctcaacgccacgcggctcacatctaaccccagttcgccagcatgtcttgctaggtacagtagtgcctcgactccgtcgtctactgccgcggggaacgggttttcgggggctcgtcggtacgcgacgctcaccattacagccccgacagtgtcgagcactgttttcgcccagcgagaatcatccgtagcggcaccaagtgtgaaaccgcctccgtggaagttgacggcgacggggaagcgatggcctagccttcgttgttcgtgataatttggcggacagtaaaagtggagtacgacgggatggcaatggtcgtcggaagtgacggtacgggtgaataacggtcggggtggacggggagggccgatctcatgtatgaacatgccgatgcgcatcaggaaccgccaaaaaatggcctgcacatagagccaccaacgagacgaggccatgttgctgcgttgctgcggtgtgaagtaacgttcctactggccagacatgtgcttcggatggacccggaaggcgacgatgataggacggggtgataggacgggggtaaaaccgtaagaccaggtgaaatatttgagattgagggaagtacgaagaatatggtcagaggaaggggaataagaaacgagagacaagagagacaaatcggagtaatgaaaataaagtacgtgatcaccgaagtaatgggttcaagttctctccagggctccataccaagaaaatcagggtttcttggttgcggatgatgtcatcacacctcctacatcttgatacttccaaggtcaacacctgggcagaggtttacattccatatttattttgatttcactagattcttttaattccactctattcaacatacattcaagtctaattatccagggcaattcctgttttgttgtcggattctttaccttccagggaaggtttgaaccattggaaatcaatcgcccgttccggcccccccacctctgccttcatatacaaactccttcccaccttctctttctctctccctcatagaacttacaccatgtcgatcaaacgtgccctctccaaggccattagaggacacttgggaggtgaggatgactcctctggttcaaacattcgctctgccttgccatccaaagctcgtaccgcccaatctcggtccggttcccccaccgcatcccctcgtcgcagcatcctcggcaacttcctacgtgacaagagtgagtatgtctcttcgtctgaagatgtctccgacgactcctctaccggtggcttgagcaaaaatcaacaaaagcggttggtgcgtcagcaccgtcgaagcgagcgcagtcgtctcagcgaggagatgttctccgagagcgaccaccgccgcaaggaagaggagattgccaaagccgcagctgaggagaccgcagagatgaaagctcggtatggcgagcttcccttaatgcagtctgccactcgaacaaaagaattgcggactcggatcgatgacataactcttgccatggagggacaggaagtgtttttcagcgcaagactacacgttatccgtcgactgagtgccaaactagtgttcctggtattccgccagcagctagctacgttccagggtgtgttgcatgagcgggaggggatatcgtctatcgccatgatccagtgggtggagcacctccgggttggctcatttgtcatggtccgcggcactatacaaaaacctgaggttccagttttgggctgctcgatccatgatgtcgagctggtcattgactcggttcacctccaggttcgccgcgaggaacctgtccccttcagcgtctacgaggcagagattcggaccaacgaagaagaaagggccgagggccgccgcaaccatatccctgaccggacacgtttggccaaccggatcctcgaccttcgcacatctacctcgcaatccatcttccgtattcaagccgcaacatgtaatctgttccgcgctgcccttgacgatcgcgaatttgtcgaaattcatactccgaagctgcaaggtgccgctaccgagtctggagcgagtgtcttccaggtcaactatttcggccgccctgcattcctcgctcagtctcctcaattggcgaagcagatggctatcgctgctgatttcggtcgcgtctacgagattggtgctgttttccgtgccgaaaactccaatactcaccgtcatcttacagaatatactgggttggatcttgagatggctattgaggagcactaccacgagatgcttgagacccttgatgccgtgattaagaatatcctcaagggtctctacaccaaacaccgccgtgaggttgagctcgtcaaatgccagtttccctctgaagatgtcgtatggctggaaaagacaccgattatccgttttaccgacggtatcaagatgctgaatgattcgggctggttgaatgaagacggcgagcagctacctctagacgaggacctaggtacccgtgacgagattcgcctgggtgagcttgtcaaggagcaatatggcaccgattattatgtccttgacaaattccctcgcagtgcacgtcccttctatacgatgcctgacgccgaagacgacaagtatacgaattcatttgacatgtttatccgtggccaagagattgtctcgggtgggcaacgtatccacgatgtccacatgctcgaggaaaacatgcgtcgtgtgggcatcaacccggatgatatggaggagtatctcgaggggttccgctggggtgctccgccccatgctggcgccggagttggcctggaacgtatcgtgatgcttatccttaagctgggcaacatccggttgacgtcaatgttccctcgcgaccccaagagtttgccagcaaagcctgtttctgaacagctccggcacccagaatcatcgaccattgaaccgccgtggcaccgtgagcacaaggctcgggcagcttcggaccccagtgagctgcagcctcttgaacatctggtcgctaactacggcgatgccacatcaacctcctggtttgacgaccgcttcaagatctggcgtgacatggccactggtgcagcagtcgcctacgtgcctagctcctccaactttgcaatcattcccggtaacccggcctgcgaccccaagcagtacgcacgcacaatcacgctattcttgcagtggctacgccgcgaaaccaagttcaagcccgtgtggatcctctgctcgcctgaggttgagaccatccttggcgagcgactaggctggcgcagtttgtcctgtatagccgaagagcgcgtcgacccgtcgcgcaaccaagccgcttccgacggcgagattgcacgtaagctgcgccgcgccgaaagtgagggcattaagctggtctctatgaaccaaggcgaaatggtaccggacgatatccgcaagaagattgacgagcgtatcagcgactggctgtctaaccgcaagggcacgcaagtgcacctctcccagatccgtccatggtgtgattccaagcaccgttggtacttctatgctctggacaagaacggcgtcgtctgtgcatttgttgctttggctatgctgtctccttcccacggtatgcaagtcaaatacagctttgatttccccggcgcacccaacggtgttatcgaatacattgtcacgcatgcaatccagaccgccgccaagagcggcgtcaagggcctcacatttggcgctggcgccacttcccagctcaccgctggccacaacatgcacggaaccaaggtcaagatgctggagcacacctacgaagcccttgctaaacagttccatcttgtacgcaagagtgaattccgtgctaagctcggcgccaccgaggacccgctgtacatctcctacccgacccatggcctgggctccaagggtatccgcgcggtcctgaacttctttgaagattaagattatgattatgctacatcatttgtattaatggctgagccatttacggagctacgatttaacgggagatttgtgtgatattgtcatttgatctagatggcaaggtgtgggcttatcttgaatagactggcatacatgccaatcagattccgggagacgcatagagagaggaaagagaagagggggtcggttgaccctaacgttggttgcggcgttagcctttggtattcttttttacttttgactcttatccccgttgcctctgttcactgcccatgcctttgcttttgttaagaattccccatcgccatcgttcatcctgtacccagcacaccccctatgtactcgatattgcggcttcggcatttaatcgttcttgttgccctatctggattttgcttttcttttttcatttctgtcattcgaccctttccgcgcctatagttcaaagctggctacacaaccttgaacttgtaactaatgattatgtacatatccatgttatagaacttctgtatgagccatatagttaaatgaacccaactgtccactcttcgtgactgttgccattccctcgttattggacttcgatttcaatggtcttctttgtttagctcatacttagttcaatcgtacatttccaaccagaaaaaaggaaaagcccccgcaccaacctcatttcttcttcatctcctccaaaacactctgtctccgagcatcatccacagctcttccaacctccttcacagcccacctaccaatcaccagtgcaagaacagcaacaagtacaatccacccagcagtcggcaccaacgagcgcgggaaaacattaaacaagaatggatcaagaatcaagtccaccgccacgggtgggacattccgcatcaatgcctgatcggtactgaagtaatctgctgcggcgtgcacatgcagaaacaggaccgagtcactggtcggcgcggggtcgagcggatctttgctactgcgtggattgccccggcgcgggatagaatttgcttggagttttgggtctagtgttgcgagtcgggctgatgtgtacatgctcagggaagacaggaggtttttgtcttctattgttttggagagcgtgtacgtgttcagggtgaatgttgttggttgctaggggtttgttagttatattatgcctggcaactgatataacacatcttataaagaaatagagatagaagggggaggggattggagaggaattggtgggtggtcttactgttgctagccagcacactcgtacttcataccgctggcccgggttcaggttttcaaggaagaaccacgagtcagtgccgtcgggggcctcggtcgttggaaacgaggcattgagacgagtgcgcacaatgggcctctgtggtgaaagacgctccagacctagatcgtcgaggtctggctcctcggaaggaacggttgctggtgctggtgctaggaagatcgttttttccacgtttgcttgcgccactgctgtgaaaagcgggagcatgagtcccagagtgggaataagcttgatatgcatgatgagagacttgatgtactgctgtgcaatataggggacttttttaggtggacgagatgatgttttagtgatgtcttattctcggctcatgtcgagacttgagcaggttttcacaatgatagtactggatgtcaattagcattcaaatgttgaaaatgcaatactggaggtatatacagtaccgagatgtgtgtcttacatgtagtactttgactataatatggccgaatggtggttcgaggtggttccccccgagtggatccgacctgaccgagtattgagatagctccaacaccgctgccacaccacacaccttcgaggaattgagctcaacactcgacagaacttggtgatttttgcaaattcaaattttccaaactattctcagcttgaaatatgttcttaatactgctatattaccaggtactaatggtgccatcacgtggaatcacgagaccactacgaggcggtcagtaaccgctgctcctcaccgggaaggaaccaatcagatccctcgacgcgacccaacgaacggatcaacaacgaagttcccccctgtacagcacagacggctcctcctccacaacatttctggtcgactttgttttcccttccatcttctcgtccattcctccattcttcaggtaaggctatcccccgcccccttccatcgtgcatttcccgtgaacctaactgagagtttcagaccgccgcgtttgttgtttgggttccatattcccctcctgattttttagcctgaaaaaacatcgactcgattcacaatgagagagattatcagtttgaacggtatgtcaacatcgtccatcaattctgctcgtcagaattgatatattctcttcaatgaacgcgctgacatgatcgttccctacagtcggccaggccggttgccagatcgccaactcctgctgggaggtaactatccactccccaattgagggacaagtcttcggtaaactgacagcttcgttttttctagctgtactgtctggagcacggtattcaggtatgttgaaattccaatcaaactcgtggtgaacgcccaatcttgactcgggcacccgtaccccctattttcttgccggaaggtaaacacccgcgactaacacccataatagcccgatggatacctcactgaggagcgcaagaaggccgaccccgaccacggattcagcactttcttctctgagactggtatgaaaaataattttttttttcaatgttcccccgccttgatgtgcaaattccaaagcatggctccctaacattctttctcccccacttcacaggccagggcaagtacgttccccgtactatctacgccgatctcgagcccaatgtcgtcgacgaggtccgtaccggtacctaccgttcgctcttccaccctgaacagatgatcaccggtaaggaggatgcttccaacaactacgcccgtggtcactacaccgtgggtaaggagatgatcgatgaggtcctcgaccgtgtgcgtcgtgttgccgatgcttgtgctggtcttcaaggtttcttggtcttccactccttcggtggtggtaccggttccggtttcggtgctctcctgatggagcgtctgtccgtcgactacggcaagaagtccaagctggagttctgtgtctaccctgctcctcagaacgctaccgccgttgttgagccctacaactccatcctcaccactcacaccaccctggagcactccgactgctccttcatggtcgacaacgaggctatctacgacatctgccgccgcaacctcggcattgagcgtcccagctatgagaacctgaaccgcctgatcgcccaggttgtctcctctatcactgcttccctgcgtttcgacggttccctcaacgtcgacctcaacgagttccagaccaacttggtgccgtacccccgtatccacttccctctggtcgcctactctcccatcatctccgccgacaaggccgcccacgaggctcactctgtcaccgagattacctccaactgcttcgagcccaacaaccagatggtcaagtgtgacccccgcaacggcaagtacatggccacctgtctgctctaccgcggtgatgtcgttcccaaggacgcccacggtgctgtcgccactctcaagaccaagcgcaccatccagttcgtcgactggtgccctactggcttcaagctcggtatctgctaccagcctccccagcaggtccccaacggcgatctcgccaacctcagccgtgctgtgtaagttccccgttctgattctttcgggtctttggacctagttgcaactttaatactaatattataatatagctgcatgctgtccaacaccaccgccatcgccgaggcctggtccgctctcgaccacaagttcgatctcatgtactccaagcgtgccttcgttcactggtacgttggtgagggtatggaggagggtgagttctctgaggctcgtgaggatctcgctgctctggagcgtgattacgaggaggtcgcctccgactccatcgagggtgatgaggagctggagcccgagtactagattagccatgtcttgtgaccggtctttgggactcttggttgtttcacttctacgggttggcttggggaccaacgtgagtctagaggttcggtcttcgagcgtccatcgggcttcttgcaaatagaagggaacataagttttgctgccaatgattttctggctttgttgttcgatatatctttaatatccctgaagcagcgatgaaatttcccctcattccatccactttcgggtttctacatacgtatgccattgttattactctctgaagttctttccttgggtctcgtaatgtgtgcacatcgtaagtaactgggttggttctcgatgtgtgtcctcccacggtcagtggttgaagaaacgtcttgggcagtggggttgagcaacatcatgcagcatacatctaggagcgaaatcccgagacgagaggaagtgtatcgtcatgtattgcattgagcacttttcggggtttcagggcgtaccaatctggggtaagtgagatcgcgagccctacaatttcctacatagacgcacgttatcttccttgtacgtccattactcccaaattgaaaccccaaaaatctagtcgaagatatggagaatgggctgaaaagagcaaggcgcagaaaagacacatgacagatcacaccctcgcataagtagaagctatctggcagcactctaatgcgctcaataccaaataccaaattatatttcatgtgttaaaggaagaaaacaatgtgttgtggtgctcctacgttttttggtcattagagtgcccacaataggttgagtggacaatcgaagcgcaccgataggcatatagaaagtgatagaagccaacagctcccaagaacagtaaggcagataccacatataggttaaatggtgttgtaaagtagaaacacttacatactaacagatgtcaaaccagataaccggacaggtctggatgactgacccgtacgagaacgcttcattctcctttatttcgatgcctattacggatgaggtatcatcttatctcagcattcagcgtcgtcaaataatgtacctaggtaaatttatgtatgacgttgaacatattcagctgtcacgtcctcaccacatattgcattgcaatggacccgatggaataaaaagaccattcgttgttccatggtactattaccaaagcatctgcatcttcagttccaactttgcctacaacgcctacaccgaggtcattgtctgatttttgtccgactttcatagctccaccagacggcgatatatcgacgataatggcgattgtatcgggagggggcaaggtctgatatactacttcagttgtagggccaggaacaagcgcgcatgcactgcattggagctagacataagttaggactttcagcggcatcccagattgtgattctttaggaaaacttgcctcattcttgcaaagatctagaagttcatcttttgtcgaagctcgtggggcttttgtttttcggaacatatctcaggactacacgttgggttacctcgtcagccttattatggaaactagacgtagagtatcgtaacaaatcccaagataataacggagataaaatcaaggtctcaccttgcaccaagcgagatactgtactgtagtcgtggacaaaaagtggggtgttttcgcaatcgcagcgcggacgatgagagaccgatgaacagatatagcacacacagtttagtggtattcgaggggaagagggttaactctgaaacatatagagatctcgtcttaaaacatcaagcccttcttgtcatgacgcattctttccgtttgggaaatgttgcaccatatgttgggcagcgaacagagaactcgagtcccaaaagtcacgcggcctaattctggcaggggcccggagcttttgcttaaaacgtcaaaaaaagaataatggtctaagtatgcatgaataggtcaagcacaaattactccccttttccttgcaacaattaatatgtaaggcttaattgctatcgggaatttgactgtttttctcatgggcccactactgaatcaaaccgcatccttcgaactagttgcatggccgtctcctaaatctgtgcgtagtcagattcttttatcgaattgctatgtctagaatggaagaggatcaccaataccccgctgacctacaagcccctactactcggatggcaaagactggtgatcaatatgagctacagctcaatccgttctaagtatacattgacttcatgcaatctgcagcgcatggggcctgcctcgcctttccctgtcctaagaacgaagatatcgaatagtcgcattggcattgtgattgaagagggacaggggtagttataaaggtataaatgggagtggtaacagccctcttctgataccattcaactatgtacgactatcgcattgccgaccattttttacatgcaatgaacaccgtcaggggcagctccaaccacagtccttccagatgtctgttgtagacatcctcttccccggcttcagtgtggcatctgcctccgcacaacagctgcttgccggtcacatggactatactcgacttttttgtactttgggaacggttatcctgtccactcgctatgctaccctttatatgggacctagtaagaagttactttagtaagtaatgccccactctgttaagagaccattctaacgggttgaagcttcaacgcttcatgtctcttactatgacgacgatgctgcttgactggatagcctcccaaccttttctccacaatgcgcactcgttgatagctcgtgtaaggtctccataaagaacgagcatccaaaatcaaggaaataaaatttgtttgactttttctccatgggatgggtcgtaatctttctggtacaatggatgcctgctcatcctccactatgtggttaaggacaaccgagaggatgtttgcatctactttattagtcgttatccaaaaattctcgaagagctcgttgaagagtgtcgaggaaattatctccgaaatattgacaaaaggatcactgtcttcgagaaccgagaaggggactggaagaagaccaggttgagaccgatacggcctatatcgacagtcatcatggacaagcaaatccagaatgaggacttgaaagatatgaaggactttctgaatgcaggcgcacagaagtggtatgctgaacgggtccttatattctacggagtatatgtaatgtctatagttagttaactatagttccggctttgatgttgacgagattcggaaagcatctcaataacaaccgatttcattagatcaactggaataagaacaattatattaattggtaaattccaagccttatcaacatctttcaattgttctttgtatgtatttagtgtcctcccccttttagggcgagacaacgtgttggaatgggcgctagaccgactgaccgccttgagaaccccaggaaccttccctacgacatcgactccagccactttctatcaccattcctcttgatctttattttcctctttggagctcgagatctattatatctcgtgtccccactgtccctgtcaaatactgcgctcgcccatgcttgtcgcatattcagactaagctgacagcaccccgtgtctccaacttgtccctcaaggcccccaacattgtgaactcattggaaggcggggagttaagcccctcctaggacgcagcaatggctgataccagtgagtgatacttaatacaccttgtcagacccaaaatgaactacaggagagcttcggcgcacttaaggagaaggcccgccgacctccgtcatcaccaccccctccctttcatacacccgcattgtctatgcgcaacacagcggagctgacggatctcaatcttccagcacaacgacacccgaaccttaacctcactcctgaggaaaagcgcgttttcttccagcttttccaggctgctgataccaccaacctcggcgtcatcactggcgaaatcgccgttccattctttgagaagactcacctatcccccgatactctcggcctggtatgtggatatcatgggtgttgggtcgcaacaatgggagccatggctaattatcggtggtgtagatatggcaaattgcggataaagagaacaggggtctcctgaccccgtctggcttcggtattgttctgcgattaattggacatgcccaagctggccgtgcaccctccgatgagctggctctgcaatgtgagtggtgtttcctatagagaaatggaactcatgctgatcccgcatcctcttcatagctggccctctgcctcgttttgacggaattgtggtggatacgacggcaagcgtcccggaatcgggtaccaaaagccctccacctggaccgggtggccctatccgtgttcctccacttcagccggatgacgccagcaaattcgtctcgctgttcgagaagtcggacatcaagaatgggatgatctcaggtacgtagctctttactgccgggaaactgccaccgcatctaacacgtttaccgtttgatctctaggtgaaaccgcaaaacagatctttgaacgcgcccgcctcccaaatgaggttctgggtcgtatctggtttttgtctgacaccaagcaacgaggtgccttggatgccaccgagtttaccattgccatgcatctcctgacctcatataaatctggcgccctgcgtggaattccagcgaccctcccacctggtttgtacgatgcggcagctcgaaggggatcggccgcacgtacgtcttttgggtcgagacccgatgtgcccccaatcccggccattccccaacaatttactggcccccagcgaactgcaagccctatgaaccaacccaatcgctcgccttttgtaggctctctttccgcccaggccaccgggggagattggttgattacgccacaagagaaggctcagttcgatagcatctttgagactgttgatacagccaagttgggactaattactggagaccaagctgtcactttcttcatgaaggcccagcttcctgaagaaacgcttgctcagatctgggaccttgctgatatcgacgccgacggccagctaagccgggatgaatttgctgtggctatgtacttggtgagaatgcagcgtagcggcaaggagccgctgccacaggtggttccgcccgcactcatcccgcccagcatgcgcggccaagcgcctgcaccaatggcagcccccacacctgccccggcacccgcacccgcacccgcagtgaggacagctgccgatgatttgttcggcctcgattcgcccgcgccgccattcgcccagcctcagatgccccaatctaccggaggctccaatagtgctttccaaactccaggctcgccttcctctagggcatcccctcagactgcatcacacaccttcaagccttttgttccgacttcaacatttggccagagcttgcagccacagatcactggtgcatcagccggaaccccggcagcagttcgctccccaccgcctccgtcggatgatctccttggcgacaatgatcccgaagaatctaacaagttgaccaatgagaccactgagctcgcgaacttgtccaaccaaattggttctctggccaaggaaatgcacactgtgcaggagaagaggacctctgctgaacaagacatttcacaaacttcgcagcagaagcgtgactttgaggcccgtcttgcccaagcacgttcaatgtacgagcaagaggtcaccaatttcaaggcacttgaggagcgccttaagtcatccaaggcagagacgcagaagctgcagcagcaatatgcattgctggacggcagccgccaagatctgcaaaaccaatatacgcaagtttcgacagccttggctaccgatgagcaggagaacgccagcctgaaggagaagatccgtcaggccaatgccgaagttgctcagcttaagccagcactcgagaaggcacgatctagtgcgcgccaacagaagggtcttgttgccatcaacaaaaagcaattggctaccgtcgaaggcgaacgggacaagctccagggtgaaattgatggtctggctagtcagaccccacagtactccgaggagtctgcgacaccggccgccagcgtgcccgaggtcgtaagccctgctgcctcaacggcaagccaaaacacgaatccgttcttccgtcgaacgggtagctcgagtgaacaggcacggtcccccgatgtctcaaatgatcagcaaagggcatttgacagcctcttcggacagtcattcgcagcttcccctgctgccgggccaccacccacttcgttccgctccgagtcaccacaagtcgcggtaacctctcctggtacttcagctgttacaaccccatcggtctcacctccacctggctctttgcctggcgcattccctgcggggcccttctctgagcccccgcctgcgagccagtcccgacagctcaccccgaacttcctgcagttcaacgataaccagtccgtgacttcgtctactatggtctcgcctcccgctagtcgattcggcggccctgaaacctctggattcggcacgccttctcaggcggctaccagtgactatggacctcaatcagtggcagaatctagcgactacagccgtgcagcaccatcaactcttgagggtacccccgcacgatctccgtttgaggagaaaggccaagacacctcggctaagttccctgaggtcccagccacaactactcagcagcccgaaccggcgacatcctctatcgccaatgatagccaggtcgaagccaataaggacctaagctttgatgagctgtttggcagcaaggcacacaaacggtcagaatcccagcaaggtaacgacttcgaggaggcgtttgcttctatgaagcatgtaactggaactgagcagacaaatggagctgcattagcccgtccatccgaattccccccgatccaagagttacaccatgatgatgacgaagatgagagctctgacgacgagggtcctctgggattcgatgacaatttcacgcctcccgcgccaaacgccaaaaaggagactcagcaggattccattgacgctgctcaattggctgctttccctgtcccgggaacctcaaacaaacccccatctcccggggcactacagagccctccagagtatgaggcacctaaagaagataacgttcatctcccccctcaatttaatggtcttttgcccgaccgcgccgatcccaccgtggcaccggacgcgcctcattcagtggagcacaccactggtgcgccagtcgtaagcaatgagacccaacgagactctatctcggatgctgctatcccgtccggtggagcgaaggtgggaggaccggactttgaggcagccttcgcgggaatgaaccttgcacccgcagtcgaagcagatgacgatgaggatgatgagccacagagccaggaagccaaaaataccaccgactttgatttctctttcgacaccccatcccagaagcagcaggctgtctccggtgccgatgttgaccaatccagctcctctcagttcttcgctttcgacaacaacgtccatgcatccgccgctccgcctgtcggatcacccaaggagggagaatccaagccttctgcgcatgaatgggacgcgctcttcgcgcctcttgacaacaccaagccgcacagcgacgaagactcgaaaggagagaaatgcaaggagcccggatgggctctgaacaacgactctggcgaagatgacctgatcctgcagcggttgacgggcatgggcttcacacgtgatgagtccttggatgccttagagaagtatgactacaaccttgacaaagtaggttccctttcgagttcagctttgcatgttttgcaagatactaactaaagaccaggctgcggaccacttaacttcaaagacttgattatgacaccttccctttctcactgcacatatctcctacatactctttccttttgcgcctatgtctcattccttgatggaagccctgggcatgatgaccaatctataagtggcctcctctgcatcgacgttcccacccgtttgtccagcgctgtgtatatcgtttcccttcatttcctttccttatgttgcacattggtatcccatggaaccgactcctttgcccacaatggtattggcccggaaccagggattttggtgtcttgtctctctgtgtagtttacaataatccataatcgagttaacatattttgatctctttgtagctacgaaacatacggagtgctccgttcctcgtatcggattccctcctcttggctccttcctttttgagtgctcaggtcttgccgcttttactccaatccgtccctcgccaacgcggttaaaagccggggacaaccactcaagtcgtgttcatcaaactctttatcgccttactccgtacatctccctatttcgatacggagtacggagtaaaactcccattattggcatctttgcttgtccactcccaactttctctttgacatctcaatcaactgcatcccagggccgtcctaaaccccctgcaccaacgaagacattgcaaaattacaacgccagcccaaactcaaacacgaagacctcctccgtacggagtacagagtgataactagtaggttgcaccctgtctagggagagggagtaaatcaaaagtctgtggtgcgagtggctccatctcaattactccgtactccgtataccatttatagatgtggactacactgcttcggcttgatcccctgtgaaatactccgctcgactacgcctgtaccgagcttataccattcacgatccactcttaaatcgactctcgccataggtttgacaacgttgtcgttgtttcctcgtttgtttattccatctcgttggcttggttctataggataaggacctcattggctattcttcaacctgtatttgaccacattgacctgttaagcgacaagtcgtcaaccaaccgaccggctaccttagtactgtcggtaactggaaatcaggcgtaacttataagtttatatccgagtttgctaagtcacttcaagactggacctcgggagtatagaacatggacgagcggttttatggagtgaggaatttggcatttcctacgagtccatgccagcatggctgagaaatccgtggcttctactttttttctctttaggatatttgacttttgccaacctggcgaaggtgtcatgacaacgcactgtttcaaagtcccatgcctttttccgacttcaaaccacgtcaaacgaaagaaagctgaggtatcgacaacgaacatccgttgactacatatggacaaagatctccacaagctcgtatcgaaaaaaagaacaacggcggctctgtacgaggctgagcggagcggaaaattgcgatcggcagggtcgtgggaaacgaatcaacccttggcacaagatctacggccattcgatctatttctgtgctaacggggctccaagatcatcttcaatcatcttaagtcatcttaatctgtatccgtgcacttctcgtattaaactataaaaccctgcgccaagctcaccacgtcccgtatattcaattcccatctcgtgttttttgacgatcacgacagcttattggttaccatggactttggcacttatttttcgtaggtaatgtgtggatgatgcggaatatgtttcattgccaaagcagagcccctattgagtgggaatggaaacgaggtgagccaggtgagcccctatatagtctgcctccaagccgcgaggacgtcaagttctgtaaaccactcgctcctttatcttctctctctgcaagactttataccacagcctccacggccaccgctttaatactcttattcatatataccccctcctgcatcatcatgcgtttctcctccctcgctgtcctgtctctggcctccgccgccgtcgccgccgacctcaagacctggaacgacgtcgtcggtgacgtgccctcctgcatcaagacctgtctcgacaccttctacagctccgccggtctcgaagacaagtgcggtagccctgattccgctgatgttacttgcgtctgtggcatgagcggttccgcttccgactaccaggacgatgccaccaagctgagctcttgtatccaagacaagtgtgaaaccagcgagctcgccgacgctgtgagctcgctcaagggctttatggagcgcttccagagcctcgagggcgagtgcgaaggtagctctagctccagctccagctccggctccaagaagggtacgttgctctcgaatctctagtttcttccagtcatttatgggaaatatgggaacctacgaatactaactgtgaactgtacaggctcctccgactctgagtctgagtctgagactagctccgagtctgagtctgactccgagtccaacggtgccggctccctggtccccggattcaacgccatgatcgcctctggtgctctccttttggtcggcgctgccctctaagttcattctatattgtttcaacgttgtggactcgagatcgtacataatctaattcatcgatcatttaatgcaacttcgatcgtgcataataaatccctcataaaagtgcgcagtagagaacagaaagtcaatggatcaagctatagaaccaaatataatatccagagcacagaatgctggagttcaccaccgtcactctatattcagtggacattgcagtagaaattgtgggtatggaacggttaatgagatgagttcgatcgaaaagcgttcggggatcttcgcgggtcccgatccgacgaaaaaaggggaaacagtcacacatttcggcatcagccgacacgattctggtttctaattcaatatatgtgcgataacagtggcacagcctctgtcgatatcagctaaaataagatttgatgatctgagcgaatatattcttagggctctatgcgtttattgtgcgcactactgcgaactattgcgaactactcaaggtagacacccagactcgcggtaagagcgtctgattaaatccaggcacattttagaccattggctcatttatatggcgcaacattgctcgatccttgtataatacgactatgattggctgatatgagctatcacattgttctagacatacaacttcgtcattatccagagcgatgagcctgtttaggaccagaagctcctggaatagcgtaattctgctatatagattttgcatatgacagttaatcctctgacacccaatataattcatcgattcactcgctgggagcctcgctgcaagactttaatatgcaaaatcacgtcattcgggccaaagaatactcatcgacacaacgtgatatcgctaactttatcttttgtcctaatttactcaaatagacgggagttggcaattcttgtatctatctcgttatggtctgagctatgtctcactctcctgaggagctcaaggggatcgccattgcagggcgagtctcttcagttctctctattctaggctcattcacgataatcggcgccttttctctttctcggcacttccggagtcctatacatcgtataatattcttcaattccttctataatctcttcgactctgtcgctaccatgatatccactagtggacccgcagctggagatacttcatcgttatgtcaattccaaggctttgctcttcaaatgtatgttattggtattggatattgccaaagcgatgttgtccgcaatgtagagctaacaaggggaaaaaataggttcccagtagctgacgtgctctggacattcgcaatggccttggatacatacttggttgtcttccatcattttgatacccaatctttacgcaagcttgaactcaaatatatcggtgttatttctaccctctcgtttatccctgcctttgtcttcctcttcatccgtggccgtgagaaaggtcctatatatggtgacgagactgtgagtattcttgatcgtcttaaaactgatgcctataggctaactaacctcctatagatatggtgctcaatagcccgcagttggatgatcctccgaataatattctactatgcgcccgtatggtacgtatactgtattcgcctgctcaactaccccttctaatagttacacaacaggctgataatagtcatcgtcctgatactatattgtctcatcggtatcgagataacccgagtccgcgacgagttcaaactaagcgatgacgaccatatcgctctgacttctggcaattccgccagcagtgtcacgaccgtcgaagcaaattccaggagaaaaccaggtttcaccccagaatctactataacaagcaataccacggaacaagatatcgaacaagataccatacagcgtccatacccacctggaagggccccgacaacttatcaaactccgcagcagagacgtgtctcgctgagacaatacgtgatcatgccatcgcttttctttcttgcgatgttagcaacgtggattgcacctaccattaaccgtatctcggaattcgtgcatcgtaagcatggaacacactcgcttctgcttgctgtgagtacgttggggtctctgcgtgggttttggaatggggttattttcataactatcgggatgaaagggtggaagaggcgagcttcggagaggagaatggctcttaggcaggtaagatggtctttttctatgttacaatcaccacgatggagtatctgctgacttcactgtaattataggttagaaatggtcgcgggtgacgtgaatcccatccttcgttctacatgttcaaaatgataccctggttattttataaaatagaattctgtgctagtatataactcgttttgtttgatcaattggaagcttgggacagactatcatggctaccatgatagttgatctgtgctcactcattttcgtgttctcatgtctagagagagccgaatgggtggaagcattccatgcgtcaattaatgagttgaaggatagtgagcttcatgttgtgcataatcgaggcaagttaccacccttctgaccaagcgccaaattgaactatttcatatgctataagactggcttgaagacctgaaacctccaggtcacagccctcaagctaccatcccacgaaaacgggctcagccatacagccatacacagggcactactgctaatgaaaacttctatccatctcaatcctcacgcagtggagacaggcctctcggcaccagttactcctgtattagactaaaagacccacgcccagatatatgtgtcggtttgtcagatgggagtttagtcaatgacttcgagccaggatgggccgcaccgccgctcgcagccttttgttagactagcaagatatcgctagccccattagccatccacatgtcactcccttaggccttcgcttcccctttctcatagtagaagcatagtccggtgcaactggcggaaatatctaccagacacaaaaccaaggttggcggctcatcaggtctttggattcttcataatcttttagagctgaaatacatgttgaatttggactcggaaagccagaaagttctgtaaccagtgatggctcaatacagacctccttgtctgataattcatcacacatggtgctttctgttactacgaagggcccaattcaccaactgtggcttaatttccaaaggcctagcgaagggacttcaatatggtatgcattgggtcttctgaggtattcttttcaggacgcttttattagactgccacagatatccacccccgccccggccctagtggtgttgcgtgtagctagacgggtaagagatttatctataaaaggagtaaagttacgtagaatattagtagttgggaaccggatgttagttttggactttaattgtcaattgactttcccccggaaactctgaaaattcccaggcaacttaatttcccctgtctatccacaaccacacataccctataaatatagtagaattatatgtgctcggctaaacagacaacctgtactttactctgttgcctagtcgggtgaagcatagtaactaataccagttagggaaatggaaggagaacacagccaatcagcgtgcatattctatgtccccactaattaagcttttgtagccggtcatgcaaagcttggctcgaggcttaactaatgtttttccattcatttcgcgttttaagtctcccattgtttgagacagaaaacctgggccttttccatttagtccctcagctaccaataatgtacagagtttatttcgatataagacaaaagaattagttgccaaggccagatccagtgaacatggtgtaacttcatatactccgtgtggagtctaccgtagagttagtgaaacattaagttcctaggttgacaactcgtggcggttttatgtaggcggtgcagcttttatggggtttgtggggtctactatctacagacggggctaagcctgttaccctacccccggagcctcgctgcaactccttcctaattatctttcacacctttcccaccgcagttgacagcctcacgcgtgcttcgaataacgcgtatcgcaagcttcccttttcattctttgtttctaagcaccatcttttgtctttatcacttcctgacttcattctaaattcactcacttgtcaaatacgcaacgatggagctcagcacacgacaccctcgtccaatacctctgggtatgaaagaactcggtccaatctctgacttggccccattttcagccttgatcatttctattgtactggtcatatttttcattgctcgattctacatccttgaagggtttctcattcgccgtctgtatggccccatctatacgaatatgagcgagctaaaccgccgtggcttcgtgaatcaccacattgccggtgtcaccaagttaatcattctgattgttgccgcatacccgtttgtcagtgtcgctttctgcaaagggccgtcattcaacacgcccttcgtcaaaggctcaatggtgacactgggagacattctgattattgtggcgcaaatgctgattggcatatacatttttgagctgatctaccgggtgaagttgtcccccgtggccgtgatgcaccacatagggaccattttcattggccaagcggccatagcgattagtctgcgcccattacgcgaacctgatgcctatatcgagtttgtcctttgtactgtctggggtaagaatattatgctctggcctgcagcaaaaggggaaaagaaaaagaaaaagaaaactaataaaattggagcataggtgccttcgatactgtgttcgagttgttcccccacgtcgctataattctctaccgtatctttcccagccggcaccacctcctcagcagaatcttcctcgtctcctgttttacaaccgcattggggacggccaccgagacggttgtgacaatgtggctgtttggaagtacatgggaccggtggcgtcttgccttcaaggttgtcacgccgctcctgcacatagcgttctctgcagcccagatacacggcactcttgtcttctggcggatgtaccgccgacagaagcgcttcgagagggaggctgacgaagaagccaaggacatctatgtcgggggagagggctcgatgaatggttttcaacctcaaagccagagggggcggattgcggagggagagggtaattgtggcttgcccactgtggaatcgggggtccggcttgctgatgctgccgagaaggcaggttagtggctttgtatgtgtggagtatttaggacagcgagcatactcatgtactagtatttatttcacccttttccaaagtgagactctaaatcttgccctgtttcgtgtaaattattcgaattcaggttgaagagcgagtgaaagagcgaggtatttgtaggcttatacagtgtagatcttgaagatgtattcatatggagagggagactcttgtagccctaactccgatgtggacgggaagggacagtacatttagtagccaagaccaaacgaccacgattctgaccattcccatcaagacatttagaacacaaccgcccacttggaaatatgagtaggcctttgcggcaacagacagaaagtgaattggttgtagtatctctctcaacgaatagtcactgctggtcgttaacaagttcttcatggtgtaagtcgcatacctatatgtctggagttggctttgcagagctcagaattccatctgaatatcagtaaccacagctagcttgcaggctgacatactgaatagagatggtcttcaccttagcaggtcctttagggcaaggtgcgaatgttctgggaaagttgcaatactgcaacctccgagagttcaggcacttagcccacgcatagtccgtgcactccaggcttctagggcagttgtgcttcagcctgtgcgtccatttatggggacatgcattatgtacatggaggtaaacgggcgtagtttggcgagactgcatgccggttataaaggcataggtcttccatgtgcggagaagaaatcgagttacattcgcatgaaagcatcttgcaaagaaggctgaatcggattttgattcaagtctcgcaaatgtacgcggttgcctggtatactcgcgtcaatgtcctcgtccgatccacgcgtctattgacgcgacaattgatgcgcgacaattgatgcgcgtacacgcgtcgccctcgcgactcgcgttgcctagcaaggcggtgatgaatacacgattgtccaaggtgccgaagttttcaaagatgattgtccagtctttcttcggtcgaggtattcgggtaccacaataaccagtccaaaattgatactgtatccaaaggctcttttagcaaaggatatacaatagcaggagaggattcaagataatctggtaaaaattaaggtctgttaatcacagttcagcgtccgataataatagaacgagacgggcaggaccaagtggtcgccccgtgaaacaagacatcgcccctctctcaattctcctcgacatgataaaatcattgaaattcacccatcagagacatccccattgatcatcatcagttcatcatctttcatcaccattgactgcagtacgagtcggtttcaaaccactaacaccgctcatgctgtgtggccattcgctgcatattcagacctatgaccggttagtgacccgtaccaaagatgtgaggaagaatggagtttctgctaacttacctaagtcttcccgcgagcgctttttgtccttcggaggtcttccgcaatgcacaatgttgttgaaaattggcgagtcatgcattccgagataagctaggaggcacaaagctgtccacccgaaggaaataacccacacccgggcaacggttacccaggacatggcttcaccgaagacaccgaatttggctatcaatgttgcggcaacattgacacaaagcacggcaacggtaagggcaaaagatgggcgattgtttcgctgaaagatcggttcagatctatccatgcgagtgatcagaatcaaccagctctgcgtcagagcaatctccaggaagaggacctcgtctcgcgaacccttgccttcgatcacacctccctcttcaccttgcaccagcatggtggccaacgtcagccaggtacccattgcaagaatgacccctagaaccaatgcttccccccagagcttgtgcatgttccatttgacaggggagtgagaataagtcgccttgtcataggcaatagtcaaggtcgcaatgtcggcaaagacagcgagaatgagaagcaggcgcacgtcgagagtctcatccttgatcaagatccacagtccgaggaacatctcgaggtgaagagacagggcgatccggaagttcacgtacgaatacatacggtgaaatatctgccgagcgatcttgatcgccacgattattgcggacagaccaggttccaagaagacaatgtcagaagcagaacgggccgcatcggttgcgccctccaccgcgattcccgtgtccgccttcttcaaggaaggtgcgtcgttcacaccatcaccggtcattgccaccagataaccgcgctgctgcagtatctcaaccacattgtacttgtgctgggggaagacttctgcgaagccgtcagccccctcaacaaagtcattcacttccgaaccggacatggagccggcgccagtgacaccaaggcgctcagcattgtatatgttggtccccagtccgagtctgcgtgccgtttcgcgtgcgatggcgactgcatcgcccgtcagcatcttgatagagagtcccagacgctgggcctcggcaactgtcttagcagtgtcatgacgtgggggatccaagcatggcacaattcccagaatctcccatggccgtccgtcacgcttgcgagcgacaccgatcgcacggaatcctcggttagcaaactcgttgaccttgccttcgtattccttgacgaaggcctcgcagagtggcgtctcgttctccactgtcctcagaatggtcataggagcacccttcatacaacagaccttctcgccatccggagcttgcacataggcagcgaccttttttgacacaggatcgaacggcgcgaaatcaagtgtcttgtacgaggcgatccgagatatggccgatttgaagtggcgaagtcctttgatgaacactctgtcaatggcatcgagcccgcccttctttcgagtagccgcaagacatgcagttaccatcagctcttccgcatttactccaggggttaagtatggggcttccagagtcagtctgttttgggtgagtgttcccgttttgtctgaacagagcatccccgccccagccaacgactcgatagcttggagatttgtcacaatagcctggtgtttggcgagacaagccgcaccaacagccattgttgtggtgacaaccacggggagaccgactgggactccaataatggtgattgcgagcgagaactcaagtatcttgacagcggggtttgagcgaaagaagcagctgatccagataatcagaagattgaaaaagaccagaatcagaagggtattggaaattgagtccatgacccgagtgaagtggcctttggtagcgccagccttgttcaccagggcggccgcattccccacaaatgtatggtcaccagtcgcggtcacaaccatgaacgcagtcccacgtttgactgtcgaggaggcaaatactttatcaccgtggtgcttatctacggcgagcgattctcctgtgattccagactgatcaacttgaacgcagacgtcgtcatcacatatcagcctgccatctgctgcaacgattgtgccctgaacggaatattagcatcaaaatcttctttcctttttttttcaaatcgccgtgaactcacatctgtcacgcgaatgatatcaccaatcacaatctcttcagtgcctatgtccacgattctgccgttgcgaaccacgcaagctctcgtggcaagggttctcttcagactgtcgacaatgttgtcggccttgtattcctgacaaaatgcaaccagggcgttaaatatgagcaggaaaaccatgactccgaaatccaaccagtggcgcagggcggcggctacgatcgcggcaaactggaattgagaaaaaaagaattgtcagtacttgcatcttctaaccacgctatcgtggtcaatgatgaacagtcttgctcacctccatcacccactggaccggtcccatcagaaaggaaagaaacttcatgaggcggttctgtttctgttccttcaggcgattccagccatacttcttccgccgaatgagcacctcgtcatcgttcaggccctcgtcgacattggtctccagcagagcaggagagtatccgggagtttcgtcagcacggatagtattttcgtccacatcaggttcgtttccatcttcgacctccagttcagcaatgaggcggtccagatcttcttcgctctcttcattggaagggttgccggggttcaatgtcttcgagacaggagaggaagatttgccatttccttgaacagggacgacgctgtctttgttttcgacgataggggaagcttgcgattccgattcggaagccacgttgggaccaatctgagcatcgtcgtcaatgggggcctgagcctgagcccgagcccgtcgacggccgagacgatcatcccgggccttggcaccagcaagcaaactagaacggaacagtgcaatttgatcttgctgttcggctagcatgctgtcgcttcgttcatggtcttcaatggaagaatcatcctccaggtaattgttcaggctggtacggaacttgtgatacttttcctcatcgctgagaacttgggaatcgtcgtgctgcacttgaccatcgtcaagctcttcctctcccaggatggaaaatctgttcgagaaggaaagagatgtgttggtatgcttggtcaggaaaggccgggctgcggtaatatccgagttcgagtgacccaggctgccagccgaggagtttgggataacccctgccaggctactggtctggatgggaggcagctcagaatggccacgtcggttggaaagaccgacagattcgttctgctggttctgttcctgggaacttccctgtggcatgctttcaagaaggcttccacgtggcagagtaccagcggcacggtcaccttcgttgtcggcgacatcttgagtcaaaggcttgtctgccggatggctcctgagtggtgcgttccgctgatccatcacgtcagacttaggtctggccatgatgggggaacggcggtaaacgctgaaagaaatcagcaaaccgtcaaacaaaaaggcacatatacaatgcaatgcacactttcatgcaagaagtgtgagctgatacatcattgatggatacgacaagatgggatgaaacatgaacaggaaggcacgctgagaggtcgtgtctcgccgctgcctctgggagcgagacacccagaggcagcgagacaccggcgctcaaaagacaaaagaacaaccgttcaggtatacacttacatgaaaagaaacggtttatgctctggcttcagcagatgtgaataaaagatgatgaggatgaatgtggagaagggtgttgtgggatgcgaggagaaagaagaagttggagagaccgaggatcgaggggtttatgaaggcgcgaccccggccacaacaagggcgacggcgacggcgacggcgacgacaacgaagagaccactaggcgacagctacctcgagaacatttctcactacagacgcctgcctacgcctgcctttgctttgttcggtatacactgtcgtctctcggcattatacagaatgacccattactgtgaataactggctctttcttccaagcatgggagactccatcgtatctacgtccatggggactcattatacgggccaattttacggtcggaaaatatgctgcagctgagcagagcctattatgagctcccaggctatggtgttggatgctgcaggtcatcgtacctagatagcttgcgttgcctgagcaggatcatgcactggaaagagtctcgataagacgacgcttatcgttggctctccgcccagggtgcttatgcttatcggagctttgagagtctacgataagccaatccataacacctctttcaacccgctgaacattgaaagcatgagtcatgtatgattcgcgtcttcaagtcagactggtttgctcgcagcttagcgccagaaagtcttttcacagtctgatattcgtcaatggtactggcagatactgactgcattctgcatatgtggactatttccaagtatgtatcttctggtgcaattggaaagcacgatcatggatatcctcaattgattcagcacaacgttgaatctggaaaaccaagaacaggatttacttggggatagtctccatacatatatgctcgggtaaaattggataaaacctccccaattccctcgcaaaaaccagaatagaagatgctttagtgttgagatgtagttctttttagggcaggtatatcaaagtggtggcctgaggcacccgaaggttaatctgacatattacctaatctcacgtcaccctcccgagcctttcacctgagcagattcaatatctgcgatgactgcgtgtgtgtacttgattatctcccttatctcatatgggtatctagatagacttgttattgttattgttattgtttatgtttgtcttcgaggatgtttgaatccactatggttattcgtttgtgctagacactcgaaaagtggaagaagtcccatgaccatctcaataccgtgaacataggagtatttcccactttgtgcattcaccctatcctttgcatctccaacatcgcgtgtcagcgtgtcatcagcaaccatggctcctgaaatcccagggttctattatggtatgtctgttttcatgcgtttcttcccttctgcggaggtatgcgagggcagtacgtaaaggcgcgtgcttctgcgtgccagtgtcacacacaagctgtattgtacttgcaagcctctggactactgccatatacgcgcagtggccaagtaccccgctacacgctctaactcctgtgtcaactcatactgactatcacagacccggagaagaagaagtacttcaagattcaagccaaccatgctgcacctcctaatgcacagtactcacagcaagccgtgaaacgaaagcggtctgaactgatggtacgtaagagagatctgcgtattattgcatttgctgatcaatcgcagaaacgtgaaaacaagacacgattcagacaacgtgagaataaagagacaatccgaaaagctgcatcgttgaagcaccctttggtgaatctgcaaagagagatcggagtcattgtatcctcccgtgccaggcaagaacagcaggctcgcattcaggccagccaactgcaccgtggggaactccatcgtttcgagccatggcctaactcctacagcatccgacatgtcttgcgcaacccacgttctgggacattgattgccggtgagtttcattggcttttatgatcccgatgcgtggctaacatgcataacaaggctcggctcgcggatatgaatcgtctgtatcgtaagttgataggcttgtggcaatcgaatgttgactactactaaccagagagcagggtctgtttccctgacattgacgagtcacagtggagctatgatcacactatggaaagggtgttattcagagagccgtactgggtgagcacatgcgtcccggcacttcgttccactgaagacacgtttaacaccccttctagttaggatcaatgtctctgagtcactcaggatacctcctgtacgtctccatacagagctatctaatagtctcactgctaacagctccagtgcaaccatgaacgaaggaccgcagggcgactgcttcctttcggcccatctcctcccagaacccgacgaaggtggcaactaccgctggccaacatgtacggtgctatatgtatctatatccccagacaccgcgcttacccaaagttttccagtctcgcatccgatccggatcagaccccactacccaatgtcgttctggtgctccgcggcgcagcccacaggatcaaccgcccacttcgccataggaacttcagaaggcctccacaccctggagggtactagtagtcattggtgcctatcgaagaagccattcaagggcaatacagtttcgacgggcaacagacgacgctcccagcgcacccagagcgtgcacgccgtggaatggatgtcgcccgacgtgattgcggcgggacagaagaactccaaaatcttcctccacgatcttcgcagtggtggcagtgccacacgtctccaacacagcgatgccgtgatggaaatgaagcagatggacgaataccggctcgtggcagcaggtcctacctcggtacgtgacgctgtctgctcttattttctttcctattccacacggccctcgggtgttaactgacatccatctcagctacgaatgtacgacctccgcttcgcgccaacgacgcttaaatatcatgactcctcgaagccctacctcactttccccgatttctcctcactcccgttcccaaccttcgacctgagcaccgagctaggtcttctggccagtcgtacgtttctcttgaacttcggaatcaccccgatttttagcttgtctgatgctaacataggcctcgctttagcctcccaagactgcaaagtccagctcttctctcttcagaccggactccaggtctcctcgcctctcacagggcgtcaatactcctctccacctagctgcgtgcgattcgagtacgggaacgataccccggagtggcgggggccgcatggaccgagtttgttggtcggcacggatgacgtggttgagcagtggacatggtaggcgtgggcgggattttggcgctggttgtttttcggcgtttcatttctcttgtatggggactctgcgcatggtctttggtgtttcttggcgattcgtttttgagctcggttgttattctgcattggcgttcgaaggcagcaagtggacccattatatgtgatgattattttctactgcaagcatgcaagtgtggtaggtggaccggaggattagcgacgtcgaatcctaagatatcttacaactctactctcctatgtacacagtaaagaattacctccaagggatagcacgatagtcgtgggccttgcgactatgccacaatctacgatgtccaagtatataacttgcatacggatataggcaatgctcaagtgaaatgataacatgggtataattgacctaactacaagtaaaaccagtatgcaatgcaggaccaagccaggaactcccgttgacaaatgcaagaacaaaacgccagtacaaggaccaagtcagctccggtagcactccctcgtccccaggaagaactgaatcagtccagaccaccagccaaccattcgccaacctcgacaccaatacccttagccaactcaccgatccagtcaccagagacattgacacaccacttatctcccgcatcagcagtggtattcccactactagtcgccatagcactatggctcgcagcgggaacgacgagccgtaggcggcgcagcgttgcgagttcagcgtagatacggtctgcgacagctgcaacccgaagtggggttgctggggggttcgggtcaatcgcatggtagatagccaggagacgttctagggggaaaggacgggccgtgagaatagtagatggaccagcgatgcctgcgccacctccgatggcggatgtggtggccgaggaggttgcgaaggcagaggagagagttgactttgtgatgcgggttttggttcgctttcctttcttgttgggggttgaagggtcgtcgtttgcggctcgtctctcttctgcctgggcctgggagaggactttcaaacgccggcggtggtgggcacgcttgttccgggctgaaagagacgatgaggagaatttggagaagaagattgtatccagtcgttgaggcgtgtgcgaggccagatatgcggacgtgaggatcagggtcgagaaatatggcagagaagggagagccgaaggcatagcagttttcgcaagcggggcccgtttggcgctggcaggagtctcgtcggggacaatgcggtgcactagtgcagactcgccctgatgtcggaagatggctctgtttttgacgagcagtcgcgagaagtcccactcggtgtttccgcctgggggcgtttcgccattcacgacaggcgcaacgaaccggggccacaatctgtcacatatggatcggaagtccggtatggaacctgctgtcggtccagccaatgagtcgtagactgtagagacaaagtacgggtatacccgcgaggaggtttcatcgggcaagccgtccaaggctggcgcatccaaactgaggataatgtggatggcctccttgcgggtatagggtgggaagctgacatgcgggaccgctgcgctttgaaggaacaatggccgtggagtcgagctaaggaccagaacaacacaaagcgacggaatctaggaatcatccggttagccgcaacattctatacccagtaaaagtcgtccaaagccaggactcacgatctcgcctagccgtgccagtgctgacagtagagtattcggtgcctctctttgtctgtcgatctcatctagcaccagcacgaatttgccttggttgtcaacgggcctcgctgccaggcactcctcaagcaagactgcaaggccactaacttgctcgcatcttcccttgccagagttctcccattcttctttctggctaagtgcctccagtgtattccataggattttcgttaggagatgccgtcccgtaatacattccgagctcctgacaatcgcgtgcggcactttgacagttgcgaggacggcccggaggatagtcgatttgcaggtcgcagagatgccatggacgactaatgttggaggactaggaatgtgaggctattcaaagagcgctgggggtcagccactttctccgaggatgattggcgaatgtcaaggattattgtcgacatattaaactcacacctaaaagactggctagctgccgtatctggacatcgcgacagggccattgtgtgctcaacgagctggcaacctcttttggtagcatgggcgggccagtcggtttgtttctgatcctgtaggctgaattggtgacaaaagcaacttgcggcatctcgctgaagctccgaagggcgacttcctttgggacgcacgtgatcacgcgtcgcgctgcaaatttggcgacgaaactgaaggaattacgaaaatcaagaatatatggaaatgtacgacggctaaagatggagaggattgtatgaaaacttaattcagctttccattgctaaaatacatgcaaaaagtgtgtgcagggtcatgcatgacgaagatctggcccaaggaccaaatgacacctatcatcaatctcaagaagcagcaagctggcaaaataaccaaggtgatgaatggataaaggctcctgagcccttgcaatatccatgctcagcccagcttgcatgcaacaatgaaccaatgggaaggaacaggcacaacacagaacgcagttcgaaaaagcaaggcgcaaaagtacaacgttgaatgggtaaaaataaaagttgaaaatcacaatggggaagcgaaaaagaaaaagaaaaaagaaacaaaaacaacccaagcccgacgaaccagtcctcaaatcaaggcaatagaccagattgttcaaaggaacgatccaaaaccattgccagataccctcaagacctaggcatgcaaggcattaggggaggaaaaccaggggaaagggggaaagcgaggaatacaagatgtcgagaaaacaaataaagcagaggaacatagttccaacgaagtctgcatcatgcacgggtcgcttcatgaaaagtatgcagtatgcaacatgggccaaatgcaatgatcatggcacattgcttcaaaggtgtatgcagtaaaacgcaagtgtggtaaatcatgggatagatgatcatggcatgtgcagttgattgatgtaggcccagttcgatgacagcgtaaaaagtaaccgtaaaatcgtaaggaaaaaaagaaaaaaaaaagtttcgtcgcgtcgtctcactatgagtacactggggttgtgaaagacaaacactggtgtgggtgtcccaaccccaatcagaagtagttctgtatttgctgcgggccgagcttcgtggacagctgaggggtgggcgcagtgtaaacggatgaggtgtcactttgtccggaaggagtgttggaagcagagctctgggaggattgaggtacataggtctggttgccgtatccgccggatgagctcgaagattgagtactctgagtaccaggctgatggtatatgaacggtttctgcagcaaggtcttcgggacctgcgaggtagtgctcatctcattgggggtgacctggccactggtagcagcgctgctaccgttactgcggccattggtatccgcagccatgatcttgccagcaatacggcgaccatgaggagtctgacggatagacggaagaataggacgaacggcctccacaatgcggttgcgagtttcgagatcacagaagtccatggcagtctgaacaacgtagttcgcaaatgaatcacgcaacatcttctcaagctcatttcccgccaggaattcgtcaatcatctgacgcttcatgtagttatctgcagtccggaggcacttctcgatcacattggagctgaatttctgcttggaaagctgaggaatattgcctgcaaaggtagagcacagcgggttggtgaagctgggctccgcaaggtccagaatgtattgcacaacataatttccgaagggatcctgaaccaaagcaaacgaatgcgaggtgatctgcgaaatcagacgagccttctggtgacccgaagcatgatcaatgcaacgctgaaggacacaacatccatggcgatgagtaccaacaaccacacaattgcctccgacagcttcgtaaatgaactcggcgtcctcgggagtgaggcggttgaggcatttctgaataacgtggttgccattcagatcctgcaccagatcaacaacatgatactgcaacgcattgatgactgtctgagtctgcttcgaggtcgagatgaattcaatcatcttctgcagtgcgcgggttccatgctgattcagggcaatcttgaccagctcaggcgcagcattgtcaatcaaagcagtgcgttgttcgtcgttggaatattctagcaacttctggcatagataatttccaaatggatctgttcaagggagaaaggttagtaatgtcaatggggttgaatggccgaaggcgtgtggttcataccggtcatgagctcaataacatgcatgtaagtctcgctgaaaatcaactgcacgtgttccggattacgctcctccaacttgcgctgcaagtatcggcaaccgtgctggtccttgcacaggctgtacaactcacccttgtaatgctccaaagggtagttgccgaaacgagtgagctgagtcgcatcattctcctggcgacgctgaaccatgttgcctcgggctacaggttcactaaaccggaatccagtaccatagccagtataggcattgctgtatgcaggagctcctgcgaagttttgcatgtggccgttgatcggggttgcttggccgacatatggctggattccataattgaaggcaggaaccgcagggacttggaatggcaaccccatttgaacaaccgaaccacgaacatgggcggcagatgcagcggaagcgagctgaggcccgaaagctggagcattggcgtgtaaagtcgattgattaccgtagaactcagtttcatcgaactcgggcttaacctggctgttcacgccactctggggaatgcgtcccatgctcgtattgtggtgatgcatatgctcattgtgagtcttgggaggagtaatagcgttgccagctccatttcccttaaccgtaggcagatcactggtggagtatgatgactgcaaagcattgggccggctcgaggcaacaggagttgttacctcatcgtggcggtcatcatggtggtcgtcatggaaggtaatctggcttcccatggaacgacgagcaccgtggcgtgacgtgtggacagagttgctgtgatcatcattgttctggcctcccagctgctccaagcgcccaaagttctggatattctgcggcatactctggtgagacgaccggtgccgactgtggttggaataattctcggagcctggtgcacgagggttggcgagatcgtgggcatcagggtttgccgacaactaatcagatgattaggtttcgggatgttgtgtgttcaatcgtgggaaacttaccatgttggagtcaccacgacgggacagcgtcggaaacttgtcgtcaggctcggtcaatttgatgtaacttttgatgtcaggggtcgacaggcgttccagctctctcagatggctatggggcttgtcttcgtcgctggggaaaaggtacttgggcacattgaaggtgtcaaggcgtgatccattcaaaccggagatgctggaccgatgagtctggccattcgggttgccggagggcagcgagtatcgatgggcagcactaaggaaatattagctacgcctttgatgacacgaatcgaaacattggattccactcacgatgggcccgatcggaagggagaggtaggatcagcaaggaagtcgtccttctcggagtttcgtcgtgaaccaggaacagagtgtccagcaaatcggtcaatcgacggctgagcgggctgtgaaacagcctggggtgaagtcaaagctgaaggagcaaaggcgttgaaaaagccgggcgaagaggtcacactagaggtggagaaacgagaagggcggccaaaggcactcgacacagtagtatcgcggtactcaggcggggtagttggctcactgactggaccagagatgccagcctgggccaagtcgcgcgcgagctggtccatctccaatttctcacgagcgtgttgaagatccaggattttcatgtcctcttcgaaacggcgtttctgttcacgcatgtactcgatatgttgtctctttttctcaaactgttaacatgtcagatgtgattcccagaatgatgctaatgatgttgttcaagcaaaagggtgggaagtttgggaaaggtatcagtttgaacggagtgagagaaatgaagttcaaacaacttgaacgacagagttgtcaaggactgcacaagactcccacgaagacacttgaaaggcataaaaccaaaacagatatcttcatagagaccccacagaacgatcacttgcacgagagacaccaaccgaaaaaacgatgtagagtcgagaagaaacgggaatgtaacgggaatgtaacgagtaatagacggcaaatagcgcaggcaaagaacttgttcgaatccgaagatatgcagacggggaacggggaactgaagcagcaaataaaagaagaagcaaagggggaatgccaagctgtggtttttataccaacccgagtggtattgcagcctagcaggcaagaatcaacttgaagtctgaatagactcagaaaagacggatatgaaccgccaataggcgtcaatcgcacttcgtggaatcgttgaccgatggaaaataggaggggggatgaatatagaacaatagggcaattgaatgaggggaataagaatgataaataacggtggatgaatagcggtggttgaatggtgagagatgaatggtgggagatgaatggcggtggatgaatagggacaggctcgtcaattcaagctgcaggcacataaacgtgatatggcagaagttgattgaaccttcagagacctctttaattttcaaggatcttgcagaggccgggcaaccaggacaccaattcaagcaaccccctcatcacccaccaacatgcaatggaaacggagaaaggtacgcaggcttaatgcatagggacaattgctaactcaaaaaagaaattatggtccttaccgaagacaacaaatccaccggatcttgagagccagagcttgagacagatcccgagcttggattcaaataattccatgacgagaacttgctcgaatcggttgtaaaccgacgttgcaggtttgctcgcacatcaccagctgggcgagacgagaatcccgatccaaagttcgaatgacccggggaaagagaagtgtacccagggaacgcagattccgagggcggggatcgtggggatgggaatcgcagctcgtcgaggcgttcgctcagcccgtgcttgaaggccatcgtgggcaggccgaattgttcaactatatgccaaaaacgacgcccggtcagcaaatatagggatttgttgacgccaaaaacgggtttttaggggagcttctccggggaagcaattacgaccagccccagatattgtgacgcgacgtcttccgctggccgaagaatatccgaacgggaggaaagggtgggctggcggtgtgtgtgtctcgtcggcgtttcaagcaaggggaaatcgagagaggggctgaggggttgaccaggcggagacgatctgcgctcgcaaaaagggcctaactcacacaatgaacgcctcgagaggagtcaaatccggttgatgggagaagtgctatatgaactcaagctgcgcaagtcatctatggacaattttgacaggaaatatcgtgtgtatctgacgatgcggagatcagtagggagttgcagagtgggataaagctcctcttaccgctccgacttagcgaacaccgagggatcgaggcgcggacgtaatgagcgtgtcgcgagaggaaatacaacctaacaatgaccgaaacgaacgatacaaaactgttgtacaaaaatggagtcgcaaaggaagagaaacggaagaagaggaagaggggggaagaaaatggctgggagtccagatcagagcggggagatcctttttaggagatgactgtgctcgcgctttttttttttttttcttcggtttttcaatttatttctgtatttttgttttcctttttgttttttatcaagagttcggtggctgttaatcttttcgatgtttcaatcttacaatatttacatatgtacgttgtgttttctccttatataatatgtatcaattgcttccacgctctcctccgggtgtgccaaaacaatacacgttatgtatacttctctactatggtatcttgccgaaaacagcttgagacggccacagcagatgatcggccagcaattactcggacattgatcgggttctattgattggagagcctccgttgtctgtacgacttgggcgcatttgtcccgggaagagcccggggtagtcaatgggctatagctcccgccaggccttggagatgctacgaatggtcaattacatggtggactgggaacaacctgggctatacacgagagaaccattgtgctaggactccggtaagggggttggttcaatgtgctggtcgacaaagcgtggcagctgcaggtgcatttggcccccctcttaacagccatttgtggagactgaagtgaccaaagtgcccgaagatgtgacagcggatcgccctctagggtgattaggcgcctgtacctgaatcctggatttgaattactgttgaaagagatactcgagattatatccccatatcagacagaataaaagagagagagaaaaaaaaattaggggctcaatgagaaacggttcgcgacaagctcttcacccatggatgattgtccttttcctttgttctggttccacgggtctgctctctcctttttaaacttatggagccttcttttatatttctggaatctctcgaatacatcttcaaatcttctttttttttgacttctaacttccccatactatcgtctgcatgagggctctcagcgtcaggacaagcggtgtaagtgccaccagcgctgatctgtgtcgcttggagcccctgatccaccaaataacaagcataccaatggggcggggatcctctgaaccccggtcatccttattatttattcacatcggagggggatcgccaatgatgggccactttttcccctctatccatcgatgaaccatctatttagaacaattattatggttttcgatctgagctgagaactcgctacggtctgtgctgaattttgacctgggaagtctccatggtactccgtagtgcatcggtacatcgagccccaactgtgcacgaactaactagtgcgctagctacttacaaagttatggtcttaggatccaataatcactatgaccacgatgagactcaaaacccacttattgacgcccaaaattgaacctgttttaattactttctttatgcccaacgcctgattacgcctccgaaattgactggctgcctcggttttaggatcacgaatcacaatccgaggtcattcgtaaattggacttactagaaggcattatgaagctgccccaaaaaaggtacattggcgaataagatctgaaactccctaggtagagagtggtctccgccccctccgtccgacccctgcggcaaaaggccttacaatggaccttctaggctattgataacagatatacccggccgatagcattgctaatgctttcgtttggtttcatcagaggaaactttacgccgtacattgtatatattgggtggaaaagataacccctgtctcaccaaccacgtgtggatggcattgcatactttctaaattgcttttgctacagcgatcagtaccatcttcgagtactacgaccgatacattggaccactcattgcgtcggtagatccgtgcattcgatcagaaatgggaattccttccggaaaaggcagtattgcggtgcagtctgtgtctgtaagtaaagggtggcaatttcaaagttgcggtcaaaactatttcgccacggacataaaattgtaatacatcgtacatgaaggaccgagtgtttctcgatactcgataaatcatatgccacaagcagtggaactacggctactaataataatcctagtagtctgtgaacggaatgccttgcgcctagtatatgcggtgggaaccctcttttccacgttgtcatatacgtgaccgcctcttcactacgtggtagctgatgttattccctatacaaagtactgttgtagatcgtctccctcaatagaaacaagtcaattctgatcaataattcgtccgtgcaggcataaatgtccggggttggcctgcatacgcaaagacccactaaatgtactaccatgtcaatggacaaaacctcaacaacctggcaaggtctcataaatccaaccatgtacggagtactcaatacgttctgaaacgttggtactaatataaattattcttccaatcagtttatatcgagcggttagctcaaaccctgcttcttcgattcctttgagactcttactcttactgcctcggagttaaggctagtatgctccgatccttcgatcttgtacgcctacttgataatgagatatactcaacgatgaatttccatgggttaggtattcgataactgggaaagtacatgggggcgtctatcccttttgacctattgtttttgatttccattagtgaatggtataatgaggtcggcccgatatatatgtcaaagacagtcaattcccgtcccttcttgccgcgcaaaagacatacagtcccagctatatcccttaaaaagaagataggagagcgtcaacttcagccaaactaacagacacatcagaaactccaatgactattttggttttacatacggagtagtgaccttggaaagccgactgcacggttatcgatgcaaggtatgtatgttagacatcgcagaatgataagcccaacatgtctacatcataaaattattcggactcctggcagcaattatatagctaattattatgcttctagttataacaccgagaagaagagatattttgaaacatctagttgaataatatctgttatcgatttatgcctcaggccattatcagctccaccggggcagcctgcagcttattaagccatctccaaattactcaaatctttcccctccatgagaatccatcttgcgagcttccctttggacgactgagtagcttgattgggatatccttttttggtcgatatctctgcacctcagccgtctagccaaaatgcccccgcgcaggaggccacagccctctgcggccagtcgagggcgacgtccttcagaggtaacaaaacttttttccaatcacaagtccaatactcctgatgattatactgactgctctgctattttccaggccggagaccaatcggccactgactccacaaaaagcaagcggccgtcccaatccaaccccgttcctcagcctcacgagcatgccgtgcccagaaaggctgagccggcttcgaatttcaaggccagggatccattcgatgcgcttttggaaccattttactacaacaagggacttacagacccgatcgatacggccagggacaaatggaacctgctgccagcattcctgaaggtcaaagggctggtgaagcagcacattgactcttataactacttcgtggaggtgcaaatgaagaaaattgtcgagtcaagctccacaattcgaagcgatgtggaccacaacttctacatcaagtttaccgatatctacgttgcctcacctcgacgagccgacgagcaaggcgatggtgggcttgatttcgaatcgacgatcacgccgcaagagtgcagactacgagacactacatacgccgcgcccattctcgttgactttgagtatgtccgtggacggcaaagggttatccgacgagcagtccccatcggaagaattccgatgatgctgcgcagttccaagtgtgtgctgtcgaataaaacgcctgctcagatgagcgtcctcaacgaatgtccgcttgaccccggtggttactttgtcgtcaatggaacagaaaaggtcatccttgtacaagaacagttgagcaagaacagaattatcgtcgagaccgacccaaagaaagatatcgtccaggcctcagttaccaggtatgaccacgtctaacccttcttttgttgtgccatcactaaccttcacagttcctccaacgagcgtaaatccaagagttacattgtctcgaaaaagggcagactctacgtcaagcacaacgtgctcaatgaagacatcccgatcgtcattttgctcaaggccatgggcatccacaccgacaaggaaatgatgcaaatggttactggagatgatgctctgtatcaagatgattttgctatcaatttcgaagaggctatcaacgtcgatgtttacactcaacagcaagcccttgattggatcggctgtcgtatcaagatcaaccgcaaacaagccgcttatcgcaagactcacgtgcaagaggcagttgaggccattgcatctgtcatcatttctcacattgaggtcaaagacatgaacttccggcccaaggctatctacgttgctcacatggctcgtcgcgttttgatggcaaagagtgacccggcccttgtggatgaccgtgattaccttggaaacaaacggctggagctggcgggtcagatgctggcccttctttttgaagatctgttcaagaaattctgtttcgatatcaagatgaacatcgacaaagtcctaaacaaacgcaatcgggccgagcagttcgatgcttggactatcgtgactatgcatggaaatcatatcacacagggtatgaaccgagccatctcgacaggaaactggagcttgaagcgtttccgcatggagcgtgctggtgtcactcacgttctcagccgattgagttatattgcagctctcggtatgatgactcgtattagcagtcagttcgaaaagacccgtaaagtcagtggtcctcgtgccttgcagccgtcccagttcggaatgctgtgccctgcggatacacccgaaggtgaggcatgtggtttggtcaagaatttggccctcatgacgcatatcacgaccaacgacgaagagggaccggtgcggaacttgatattcatgctcggcgtcgaagatatatcgagtgtcggtggacaacagctctatgctcggggtgcttacacaatttctatcaacggcacaccgactggtttgaccagacgccccaagtccttcctcaatgccttccgaagactgcgccgcatgggccgggtttcggaatttgtcagcatttacatcaatcatcaccagcgagccgttcatgtcgcgaccgatgatgggcgtatctgcagaccccttatcgtcgtggaaaatggcaaatctcttgtcggtgctcagcatctcgagaagctgcgtgacggaaaaatggagttcgacgacttccttgctcaagggctcgttgaatacctcgacgtcaacgaggagaacgactcctacatcgccatttacgagaaggatatcacaaatacgcacacccatcttgagattgaacccttcacagtgcttggcgctgttgctggcttgatcccctatcctcaccacaaccagtccccgcgtaacacctaccaatgtgccatgggtaagcaagccattggtgccattgcttccaatcagttccagcgaattgattccatcctttacctcatggtctacccacagaagccaatggttaaatcacgaaccattgagctgacgaagtacgaccaactacctgcgggtcagaacgcgactgttgccgtgatgagttactccggctacgatattgaggatgctctggtcctgaacaagggatccgtggaccgtggctttggacgttgccaggttttccgcaagtacgtcacgacactgaagagttaccccaacggagcgaaggattcccttagagcaccgacgttcgagaatggcgctccaatccgcaagcacgcgcttctcgagtctgatggccttgctgcagttggcgaaatggtcaacaacggcgaaacctacatcaacaaagtcacacccagggtacagaattccttgggattcagcggccccgacattggtggtggtgatgttcttgaggcacccatgaattacaagctgccggatccttcctacatagacaaggtcctggtatctgccactgaaggcgagacgcaactcattaaggtcctgacccggcaaacccgtcgccccgaggtcggcgacaagttctcttcccgtcatggacagaagggtgttgttggaattattgcagaccaggcggatatgcccttctccgaccaaggtatcaaccctgacattatcatgaacccccacggtttcccctctcgaatgacagtcggaaagatgctggagctggtagctggtaaagcaggcgttctgtcgggccaacacggctacggtacttgtttcggcggcagccctgtccaagaaatgtcccagatcctgatcgacaaaggtttcagctatggtggcaaggactacctcacttccggtatcaccggtgaacctctgcctttctacgtcttcaccggtcccatttactaccagaaactgaagcacatggttcaagataagatgcactcccgtgccaagggtcccactgctactctcacccgccagcctaccgagggtcgttcgcgtaatggaggtttacgtctcggtgagatggaacgtgattgtttgattgcctacggtactagtcagctgctgctggagcgtctgatgatttcgtctgatcgccacgaggtggatatctgtgaaaagtgtggtttcatgggctacttgaactggtgtcctgggtgcaagtcgtctcgttccgttgtgaagatggttatcccctatgccgccaaacttctcattcaagaactgatgagtatgaacgttacggctcgtctgaagcttgatgatgagttccctgagacgatgggacgttaaactctggacttggcttttgggtcgattggagtttgggataatcaaaatgggacatgtgcatacttggtcttacgaatgaatggcatagcgcggcgatttaatatcatctttacctgattatccttttctgtagaacgtagctggcgcttcagcaacagcaccacgggtcgacagaaataggccggcaacaatcctgacaaaaaaacaaattttcaatttaaaaaaccaactggaggaaaagtagaatagaaagggaacaccgcattagagcatcaacacattcgactcaaaagcaacatgctgatagcgagtaaattccgcgacgtcctccaaaacgtttatcctcatatccaaagcctcacgcagactcatcggcatatcacccttttcatctatattatcaagcgccactttttgcaacccttccttaacccccatcccaggcggaatgtccttggtccaatcaaaacgctggggcgcgacattggccgtagagataatacgcatatttggatcgacaaggaaaaacacgagggcgcgcgtgcacccaggcttagtcctgtccttcaactcaaagcgcgtgaacttgtgttctatagtgctcgggtacatgaccactcggcctacattggcgcgagtcgaacctgggtattgaatggccggctcgccgtttaccaaaccaaagacttgctgcagccagatgaagtcgtttgggtcgtgctcgacttctgcgagtggctgggtttcaaccatgttgcggaatatcatgtccgggctgctgacgttttcgtgggcgtatggtatgaatgccgcggcgcagatgtgctcgttctgatttgtttattgttataaagtactgtgggtgttattggagcggttgaactcaccatcgtgccttcgacatgccagtctgtctcgaaagtcggattatccggtgttagatcaacgcctaatatacgtgtgatcacctgtaagccgcgatccttgtagtccttgttgatatcgacacttcgttcaatccggacggcactgggaagatcctcgggaagtttgtccatcaaccagggtggaacggcccaggggatgaacttcgtggcgtcgggttggatggcacggtagttctccattctccacctttcgttgcgctcgatgaattcactcggcgcctctcttggatgcatctgcggtgcctgggcagcgacgtccttcggcactgggtaatactccgccttgtggtattcaattcgggaacgggaatggagcatgtccttgaggggagtcaaagttgcgttccattgcggaacgatgagattgaaaatcttctcgaggagcttgtagatgggctggtgtttgactgggtgcaggttgttgatgtatgaggctatgcgccattgtccatcatcgccgagttcccagtctgaaggcaggatctggaatttccggctgtagggccgaaccttgatatctgcccgagacatgacacggaaggcaatgtcttctctggttattccagtctcttttgggaccggaatcacttcaccttggccggcgtacctgagggcatcttcgaccccaatgatcctatcggtgagaatgcgagttctgccgtaaaggagcgggtacaaggccatggaaatgaggtcacgctctaggtttaggcttcctggatggaagtactgcattggtttcatatcgtattctagcaaagagaacttgtctctcatctcgtcatagagcccctcaggcatgtttgtatcggacttagtgacatcgccgttgtacagggccactatacctgtagtctcgtagatcatggctttgaattgaagctcgtcaataatccattcagccatgttgagcgtaatgtctttgtcactgttcaaagcatcctttttccacttctcttgtgtatcgggctcgaagacctgaagcaatcttagcgatatggtcaggatcggctgtattgaggacaactgacctttttccaccactcaggaatatcggtcaggtcttccatgacctccaccatactcatctcacggagcgtcaagacgggcaggctatgagggttttcagcattgagctcctctcgggtcgtgggaactctgcacttactccacgtatcctgcttggatgtctctatcatccaaggcagatggaaacatactccggctttcaacaccgtagacgtttttctccatcggagcaaaatccagtggccggttgaatcccggaagagcgaagcgggagtccttctctgccttggaatggaggaggctcggctcgtgggattggtgttggaacatcgttgcgtttagtcaagaacagtataccgaagcaaagtcctcaagaatgatgtgatagtcggatgatctatctcgctcggtcagaataacattgggccaccgaagtgcgccaaagcctactttgatgaggtttatcttgtaatggcctggaaatatcagacacaagcaacaaacaagtgaaaaatgatgattgaaacggaagaatgctgaaacaaaccaagctgcggacacttaaaacgagcatcaaattaatgatgcaggggtgtcgtcgccttgtattcctatatcgcaatggttgatgccgttcagacaggagttgcggaacttggctccgggcctttcggccctttggcactaacaaataggcatatgcccgggtgatcttgagttatcagtcatagtgatacaacccaatgaccatggaatggcaaaactttgctgtggttaaagctaaaaagtcaattgagtcaatgaccttgaaaggttcgatggaagtaaattcctgttccttcatatataaccacgggctgaacactcgaagaagggggaaaaatgtatgtatggtggcaggcagatgtgcatgactgtcgtacagcatgatgtataacatgtacaatgtagtcttccctcttagggcaaagcaaaatcgaaaggcaaaagatggtcatcacgccaacaccaaatctcccaagtactctcgaacaataccccaataccgatccggctcggctctcatatgtgcaacatgaggggagttcttaaacagttcacggcgcaccgcccagccctcagcctcggcgtttaccgcatgagattccacatcgcgccagtccaccaactcatccgtatccgagtagatgtagcaacgatcgagagtcccgtccgggttagccgctcgcaccaaagaagtatcattgatgagcttccgggccagggagataggatccgaaaacataggaaaagaatggaccaacttgaagaggaccaagaaaacaaaaagcaagcttttgccaagcagccgcaagatccacatccgtggaagcgcaaaggagaaagccttgagtccagctcgtaggctcggactgcccggtgcgctatctaggatcattgccgagatgggcaatggggatcctgtcgcatttttccaggcttgtaataggtgcgttgtgctggacatgcctccatttgagaagaagtgtacaaatactggattctcaggggtcactaggccgcgcattgcttccacggctggggcgacgcgggctctccgggtctgggccctcaggcgccagatgaagtcacttgatgagcttctgacgatgacaattcgtgctgatggtactagtcgtctgtattcgacgacatattttgctagtgcgcgcgcgggtgcattcatccaaaaagcaatgaatatcactggtcgatccgccttttcgcttgcgttgagcgggtcttggagatagactgagggggccagcctgacaaatttggccaaagggggcccatctattgtggccatgatgcaaccccgagtgtctggtgtgagatcaatagtgtagtccagtttcagggcctgtggacggcgatcctcagcttgccaagagccgtgcgcactagccgaactatacgatgccgtctctgaccatgagcatgacttacctgatacttgacttaatgtgtaaagatatatacacggtgtgtttgatcgttccgaaggacacagaaatccacaaacctttgtgttgcaaaagtctccgagatcacgagattgagagtcaaaaggaccgcgaaagaattaccactcgctggacaacaaagactagaacgtggagaatgaaactgtctacgagaaatatgaagatagtgaggtttattgcaaggccttttatgtattcaagtgaaagtaaagaactccccaaacgccatgttgaaccttgctatgccctcgaaggaaatcccgtcgcgggatctagagatttccactatctaaaagcccaggagaatcatgaaagtgtaggtttaaatagatcgttgcagacattagcgcttccccaaagttcgaccgccgtcggactttttagtgttgtccttgcttttttggctttcagcgtcacttccagagggggtggcagagtcagacagatcctttcgctttccgcgcaaagtttgcccaattccttggaacttgggctggtcatccgggacgacttgaccattctcatcacggggtttgacgggtttgattgcatacccaaagaagagctgattaggcgggagtcgaagtggttgcggaccattgactcttcgggccggaggtagatgtgaggatcttacagcacctgcagtaggcgtggaagggttaggggtcggagccttgctgccctttttagcgttgagacgttgtccggcagacaaaaagttggatgataccgcacgggcacctgcggcagcatcggtggcctcaggggcgatggcggggtagttgattgattgtgccatggttccatgggggtgcaatagtccaccagctggaagctttccaccgctaacgacgctaccgggtgtgctggtcccactagtccgctgtggctcttcgaatccaaccggcggggcgaaatcaacctccaagtcggtttctagaactgacacagcatccttagtgccagatggttttgtctccagcactgccatctcatatacttggtcgttgtacgaaaaagtgaagacgtcgcctttggaaagacatgagaaattccggaaggcgttttctagcacagctttcgggtcactaatatcgaggaaggaggtcgactgtgcttggagtttgataaactggccaggagggaggtccgtcgattttatttgaagaagatcaccaggttccagtagtaatgtttgcatcagctgtagagaaccgagtcttagcacggtcacaacacttagagcacttatgtcttactcacccagaatggcaaatagatttttccttcttcagcaatgaactcaaggacaccggcatgtgtcatcctctctctcgcaccattgtgaagctcgaatagcatcggataggtaatgtgcagtctggtaagcttgtccaatgcgctgggaggcatgatgaccttgccaccatgattcacgttctctcgttcaggtccaggaagcatcgctactggatagcagcgataatattcatcgaagcgacgggatgttgcgcccgggcgcgacatgccggcacctaggattccatccatggggtcgtccgaccagtaaccaggtcggtactaaagctgttagttaggagggtgaagattgggagagggatggagagttcaagttgacttaccatatcagattctttgaatttaaaagattaaagatggatatagagaaaggtgttagtgggaccaggtttatttgaggtacaatacgccgctttctggatcgccgtcagtgacgcagcttgctcgctccgcatgattttccgctccgaccccggacaaggaaatcagctctctcagcggtgatttccctttcaactttgcgcaacattgcctttctcatttagtttccgctgaaattctcatcccaagcggcatgtcgagctcatttccgcgccccaagcgcgcaggtgaagattttgccagtaccgactacaatgacggcggcgaggattcctcagagcacaagaagccccgcttcgaccttcgcaacccctcagctcttgcagccgatgcgcccgaagaagacgcagtactagacgccgatgaaattggcagacgtggccagagagtaagacgcaaggcggtcaatctcgagggctacgaatcggacagcgagaacgaagggttttctgcgcacatcgaagagaaatcagcgcgcaaacgagcccagcacgatacggaagacgatgatatgttcgccgagctacaagaggacttcggcgaagaggaagtcgatggcgacgaagttatacacaagaacaaaaagtccgttcgcttcctacgagacgacgagatcgaaggtcaagtcgcttcttcgaaaagtggaggagcgcttcatgttgatctgagcaagggtgcatctcatgttgatgacgaggagagtggtagtgaagttggggaagaggaacgcgcacgagtcgacgacgtggtggacgaagaacttggcgcgggtgggaagaaaaagcacgcacctctcctggatgccttcaacatgcaaacagaacaagaagagggccgattcgacgaccagggcaactatgttcgcaaagcagcagaccccgacgcggcgtacgactcgtggctggagggtgtttccaagaaggacatcaagaaggccaaagaggctgcggagcaacgcgatgcagagcgcaaagagaaggaccgcatgaacgacagcattttgaccgcggatgtcctgaagacgatcatcaccaacctcgaacgcggcgaaacaatacttgaggcactggcccgactgggcaaaggccttccccgaaagcctaagtggcaaaacaagaagaacaagaagaacgctgcccaggatatcgagatgacggatgaggaccccaatgaggtggctcggaagcaggcaattgattctcttactggcgccgcagatatcttgatgggccgcggccaaatagatatatatgacacagagcgcgaaatgctcacacggcagtatcgcaacgacacgggtgaggaatgggttgatcctcctgcgagcggagtgactgagcaaggtccggccatgtgggaatacaggtggtcagacgctagagatggaggggatgcccatgggccgtatgacagcgcgatgatggactcatggaagaatgctggctactttggtgaaggtgttgagttccgccgagttggagattcagggtcatggtccgacactgttaatttcttgtaatatgatcgatcccccatatcacctgggcagctacgactgctttgactacgcaaaataccatggatgaatgaaatattaatatcagaccctccagaacagaggactgcaattgaatctcaaaaggccaaatcaagtcaacaagcgccagtcctatcatacatcgtttgatgtgacaaaaaataaaataaaatcaaaatccagtgtagtttttttcgacccgcttaactgcccaccgaatagcccagtactaaaacatgtaacctaattaagatagctccatggcgtcgccattggtagcagcagtgaagctaacggcaccttggtcaccgatgaagcgctgttcatattggttgacgaacttcacactccgagcggggtcatagaacaatcggaagctgcgctggacgtcatcaacactgacctccttggcctttcgtttttgactcaagaggtgtgaagtagtgataatgttgctggcataacgcagatttgactcctgaccaatcttagtgagaagggcgagagcatcaggcgaaagatcgatctcctcttcctgcgctcggatggcgaggatttgacggatctcgtcaccagagtacatctgtgtgctaacgataacaacacgatcgaggaaatcaaggggtaggccatgaggagaggtgtaggtggttccacggatgcgtgactggccgcgattgctagccatgatgacgataggggccaactcagcctcaagggcacggttgatgtaggagtaacactcgatatcgagcatgtgaacctcgtcaatgaacaggacaccgggaataatctctgccttgccctcttccttccattcagccaccttggtattgatctggtcccgaacttcactccgaatctcgcccgtatcgccggagaagagggccaggaacccttgtgaacgcgagttaatgacgtcgatctcgtgaaggctgacggtgtgaacgatctccttgcgaacctgaagctcgccttcagggcattggacaaacttggtatcggcgcccatggcgtcgtagtctcgagagcgtgcgtatgaccggccgagcttggtgatcttgcccgaggacttgtcaatggagatcacatctcctgccattactcgttccttggtcatcgaatcaatcatcttggtccccatgtcgtaaatcgtttccatgtccgtagtcttgatcgtgagctttccttgtttatttccctgcaggtagtcagcatccaatgctattaattccctccgcgtagataattcacttacgccagtaacactccggtcaatctgaatctccacaacttcaccctcaatgatttcgctctcttccttaatgcgcacaccgatggacttccggaatgcctgggtcagggcttctgtcttcgacatctccattgagaaaatttcagaagcagcaagcatggtgaaaggtacatccggtccgagagattgtgccatgcccattgcaattgctgtctttccagtgctcggaggtcctgcaatcagaacggcgcgaccggcaatcttgccttccctcaccatctgcaaaatcactgcggcagccttccgggccttctcctgacccacgaggccttgagacgatgtccgaggttgaagggtgtctacatccactccaaggcctctgatatgcgaatgggcagcgatgagattcagtccccggagctccttgctctctgcgacagtcgagattggctgttctgctgtcagcaactgtgagaatattatagaacggttgtaactcactacagccatacttggaaatttccagggcggaatgtatcttaaacaagaagattatgttggtaaaatacgacaaagctctagaaaagcaaaagagaagagagagccagggcagatcgcagatccccgtgcatatcaccgcccggcagaataatctcccaaagaaacggttttttgtttgactttatttccacttgttgtatttccaccacctcaactgatttcacagatttggtgattttcaacgtttcaaacctggcttgtctggttcccttggatacctcaaggggaaccgactaggcgttttcaacaatacccaccccgacaaccactgtacctcacggcgaagatttcgcgtggtgaacgcacaaattctaggacgttggggcagactgcacatcttctgtgtggacctctgaaaccccgcctccggtcttgcaagtacgatgagtattctgcaatacattcactctagggaatatggccagcagaatggatgttgactctcctaaccccaattcccgcaagcgattggggggcccattattcccgcctgtggcccctccgaccaaggcgcaagatcctcggcttgccggcaccgttaggcaatcagttggtcctcaatcatcgaatacccaacaggcacaccaaaacctcttcatccagagacctgctgcagacccggccccacagatgcctccactcttgacccctgatagcgcccggggccctacgtccacagaaaaccaaaatgcacctggtcatcacggtccattgtccatctcagatttggtcaactcattggtcaagttgaacaagtgcgaggaagagaaagagagactccaaaaggaaataggttctatcgccaaaaacctacacagggcgaagcaaaatcaacaattcccgagcgtcatcgctcttttccagcaacagctcgacgcggccaaagatgaattagccaaccatatcaaatcgattgctcagtataggtcactctccaataaggcgcaggatagctttaattcgacattgtcgcagttcaagcctcaaccccagctcgaaaagatacccgagagggtcgataatctggagtccacgatcaagggaacgggacaaggccctggcctaacaggcagcggtgacaatccaatgaaagggaataccgaaattggaggagtccaaacggacatccgaagccgggacaaagatatcactgaactcaggggaaagctggacaaagtggaacacgccctcgagcatcctaatggcttgaaggaggcactggaatacgtgggaaggatcgcgaactccgtcaatgttcaatctatacggagtggtcgatttatgaaccagatttcaagccttgaggatgaagtaaaggctgccgaccagaaccttgatggtaagattgctgccattaagaagatggtcgacactgtcgaggaagagctcgaaaattccaaccagcggctagataccaacatttcggatcttggttccaaattgaaaagtacgaatgagttggttgagagcaagctttcttccattgaaagtgatatcagggctctcgatactcagcgacataatctgaacaatagcacgtcaactcaggtctcacagatcgaaaccgactttgaagctcaaaggaggcaggcgacggagaagattaccgctcaagaagatcttctggcttcactcaaaacccagcgacaaagccttgacaacggcggccggctttcatccgaagcaaccccaactccccacagcggggtgcttacaagagtggtgtctctggaaaaaagagttcagaaacacgccgacctcctgaacaatattacgaacctccacaaggaggtggatgtcatacgtgtagctgaattgtctgctttacagcagaatcaagaattgagccaaaaaacattgcaaaccagacaggatgacactttgggaaaggtggaggacctgacgaagaaatctgaggaaatgaccaacagtcagatgacactcagcgcggacttttaccaacttagagcatccttgcctgggagcttggagcgcctccgaaaccacctccaaagtgaactagatggattcaaaacccgccttactccagtctccgatcttgctcaggccgtaactaagtgcgagagtaaaatcgagtctatctccaggggcattcggtcactagaaaatcgatggaacaacatcactacgggcgatttagtcaattccatggcacgtgccatgcaggaaatgtacccctctgttgaccaactgagtcaacaattgaccgcccaccgaagtgaaattgaagccagaatttctgcacttaagtcagatgcagatgcgttcaaggccgacacggagatgctcaagacagatacgaaccaattgaaggcagatacccaaaaggcccaggtagatgcacaaaaggcacaggccagcgcagagatgtctcgagcaccacgggtgtcacccgagcaactccagactttgactcagttgccgactttgccccaacaggtcaaagacctttctgacaagcttgttccaatcgaacgagctatcgaagagcatagtgatgagctgcagaaaaatcttgtactgcggagtgaattgcacaatagggtcgaggctcaagacgacgcgatcggaggcatttcttcaagggccgaggatcaggttggtgtacttgaaagtatcacggagtccacggaccagatcggaccattgatcaataaggtcgatgctcacatctcgcaactcgaggccgttcgacgatcgatcgacgagttaactggggctgcggagggaaaccctacagcatccggtactcttgacgcgatccggatacgactgaaaaccatggaagattggagcaaaaccgaaggcgaagatcgcgccgatctccgtgcacaactgagaagcttgaaggaagaggcagatcttgacgctctcaaggcaaagctcaaagatttggaagatcggaaggaaaccgaagataacaattttaccgaactccgggaacaggtgaaagcccttgaaaaccggggaccgccggtatcattggagcaatttactgcgcagggggatgaggtgaagatgtacatcaaacgcctgaggagagctgaagacactttcaaggtgcttgggaaagggcttggaaaaggagaaagcattgtcgagattctcgctcagtgggcgaaggaggagcaggaggaggaagaggaggagaaggagggcatcgatggaccggaaactcctcgaccccaatcaaatggtcgtgctgcttttactcccaggcctaccggaacacccaagacagtccccacgggccctactctaggtgcataccaaccagtcgagctcaacgtgaagggtcatgccggcactcccacactcagcgtttcgaagtcaaaccacattgcgatgcaagttcgacagccatcacgaacgcctagtgggcccagctccagtcatccatcgccgtatggcggcaaatctgccgaaccccgtcaggttcaacatctgaaagcaaagcgacgggtgtcctctgtaacggactctgaggacgaaataagcacagccgaatcctcttcggtggttgagtcttcgccggctcctagctctggcccgtcatcttttcctctgggctccagccgaaaggacaagaagaaggcaaagaagagagcagagtgggcagaagagaactcccattcttcaaacagaacaagcaagaagcggaagaagagcaaactggagaatgagtagctccaggcctaatctcatagatgagattcttctccacaattatcacggtgggcctgttctccccctcgcgtcactctccaattacgaaccccatgggaaccaacgacagctacatgagccagctttagggaaagcattatcaggtccattgataccttgttcattagtaggctcaaagcctgaccggcgatttactactcgaaccgatatcatattactcagcacaccactgcgtgaattattattttgtacatggaattccctacatacgtctaatctctaaagtcacgtgactgatatactaccccaataatgtgggtcccaattatgtcgaccccaaaaacttcacgaccgctataaatatcgtgtaagcataatatactatcaatattcgtcagaaagggggccattaccttgtcggaatgcttcagggttctcagaaatgagccagtggcccgcttcgacgtccgcaatctgcgcgttggggaagaacttcttgatggccggcaccgtgtcgtccgaaacatacttagacctagtgccacgaacgaagagcgtcggaccgttgtattgcaggttatcagattccttgaaagggaaatcggccatatgatctaacgaaccgccgatgatggatagcggtactcggaacttaagtgtgttatcttcctcggaacgtatcaagttggtgagaaggaattggcggattggaagagactaaataatgttagcatgctaaatattaccggagggtgctaggctcatcagcccccacgctttctccccctagtcgtcaagaagatgaacaccccttacctcttcgtagtcttcgagaatcttattagcatcggattgcttcgatactttctcggcttcgatcttttgcatgccgcgaacgtatttggggaaatcgctcttcagggatgcgttcacgggtgcgttatcaacggggatcaaagctgacacgcgctccggggcacgtagtgctactgccattgcagctttggcgcccctttgccaatggttagtatgagaagagaacgcaagacggataattcgcgtgctagagttgcacttgacatggggaatatgaccacgtacatcgaatgcccgatcaggacgcatttgtccagtttctgctgctggataaattcctgcacatcttccgccatggcaccgtaattgtgctcaggggcatggaaagattggccatggttacgtagatcctgttcattttggttagcatcctcaaattacattttttttttcatgtctttccagaacaagcggacacttaccagtgcaaagatctggcatttcagatcccgtgctaaagccctgggacatatgtaagaacagggagatttatacaaaggtctgttcacaaaacatacttgccgatacttctgttgttctgctttgatccaaagagtccgtgtagaatcaggatggggtctcggacagcttgcccgttttctgggccaaagacttgatatgccagctcggattgcagcatacgggctgtggagaaagcccggaggcctggaacacaacgtgtaaccgccctgagggagaacatgttctgacttttgtgttgagaaaatggcaagtatgaaaaggttggatcaatgatgatcgggaaccttggaaatacccgcgggcaagccgttcgctgactaagcaagtttcaaggcctggggggctgggcccggcctcaggggggcgactgccttggaagggggcaggcgggcgctactgggcggggctttgaagccggcgctttccaagggaccctggcatcaaaggctccggccacaaaaatcccgggaagggatgcccaccaagccccccagcccaaggccaaccaaggccaccacagccccctaaatatcacggcttataattgcttctgcttacggcaaaattagttacaacgcgtctttttgatcattttatccctgctaactggtgagatcgtctcactatatcaattagagcaattaccacagagagagatgcaatatacttgtaaggagaaattcacaccgaacctcaattcaatatctgtcactgatattagctggtgtttaccgagaacttgatactctgctgcgttaggcgtggcgtgtatgcccggaggccgccataaccggcggtgaaggcccccgcgggaccgtgaccgttagaggagcccggcaaccccacaattaccattgccaactgctggtgtacaagatgggccgtgttggcatgagttgatgcgagcatataattgtattagtgtgtttcctgtctactcggggtatgtgccgaagtcaaggtctcactggtcgaggtctggcccccaattctgcgacctcgtgactacctattgtaggtagccgacttcatcccaccaaagctcaaagtccccgctacccccgctgccacatcagagatagcttcatatcttcatcaaaataaaatcatctcattatggccgatcaaccaaagccgtacaagatttccgttcctgataagagtctccaagaccttcagcaacgcctagcactttccaaattagcaactcagctggagtcctccgaacaagatccttgggattttggaaccccagtgaaagaagtacggagactcatagattattggaaagatggctttgattggcggaaggcagaattcaagctgaatgagctgccccaatacaaaatgcagatcgaggtagatggatttggcagtttggatatccactgtgagttttgtgcagagattctcaaaggttcgatattcacggggttcaacttgtagatgttcatcaaatcaacaccaacaaggacgcgattccgctggtttttagtcatggatgtgagtttcgatcttctgttctatcgcacgacgaactaatatctacctatagggcctggatcgttcattgaagtcacaaaactgctcccgatgctaaaaggcgacgacgacagtcccgcattccacgttgtggctccatcactgcccaatttcggcttctcttcaggggtgactcggcgtgggtttggacttgcacagtatgcggaagtcttgcacaagctcatgatcaagctgggctatgatcagtatggtagggcccgaaaaaaaaaatacgaagtgtaccacctacacccgaaactaacttggttatgcgcacagtgactcagggcggagattggggcttctggattactagaaccatcggtctactataccccgagcactgcaaagcctcccatgtcaacatggtgctagcgaacccccctcgattcaccgagaacccatgggcagccctgaaacatacattgctaccgtataatgagcgggaagagacaggccgcaaaaggaatgaatggttcgaacgagagggctacggttacaatcaacttcaaagcaccaggccacagaccattggcgcggctctagatgatagccctgttgccttgttagcctggatttacgagaagctgcatgactggacagactcatatccctggaccgacgacgaaatcctaacctggatatctatctactggttttctgcagctggccccgcggcaagtgtccgcatatactacgaagcttttcatgccgggatatccgggaagtcatacaaggagttgatttcatacgtcccgcgtgtgaagttgggaattgcgcacctccctcgagaaatttctatcattccttgctcttgggctgctagactgggcccggttgttcaacagaaagagtattcccggggaggtcacttcgccgcttgggaggtcccagactctattatccaggatttgcgggccatgttcagcaagaatggtccttgttacgggattatttcgggcaaagacggatactgactatgtgattgttggttactgctatttgcggtttaataaattccatattaggatatgtacccagtggtatcggagcttgttgaggggctagcagaaggtggaggataaattgaaggtcacttcgcttgttctttcagtttttacatgacaacaagggaaaggaagtagaatgaaagtaatcgatattgttgataatgtgatatatttccttctccaaatggtaccctcatacagccatcatcccaaaactgatcaacaaagacggtagcacatagtacaatgagagacttgtcacagtagcactaccagtggccctctcgaaactgattagtgacgcattgtggctcgacgctcctggcaggaccacctgcgaggaattggcagcatcaaaactacccgtgaatgtcaattcaaaagtcacatttacttttgtctcggtgtctgtgattgtgaaactacgttcaaacccagcaactgtcgagccagagaaattcaactcaagggtttcattggtcatagacccattgatatgtgttccagtgggccatccaatgaggatcttgcccaaccttctcccctccgagcatagactatccggaagggaaatcatctgatcccgaagacccgagttgtcatactctgctggttccatggagttcctttcaccatgtgcccagtctttgagatcatagaccccgtcgaacaaaatcttgttgctgttatccgccgcctgggttatgtttaacgcaacggcatccatggccttctcgacggaacctccactgtaccagtccaccgtcgtggtgagtcggatgagatccaggttttcacacacactgtatgaatagtcaatatccgagacgcggatgttgctctcccacgccttgaagcccaacgtgaagggattgacgggtccggcaggggtgggagctttggcaccgacccatgcagcgcctagcatgcgcatggattgtttgccgacgggacatgtgatcaacgatgaattgacgatgtcgccttcagtcaaattgtttggtggtgttatgatggtgtatttgagactggcttcgcccttgaagaagacgccatcccagtcgctgtaagcgctagcatggccacggcgtggtgcccggttatattggtaatagtgtgaaggttgaagatcgtcaaagtcgaggcggtgcgtatcggagcagcggtttccgcccgatgatgttggtgaagaggtgtcatcactatcaccggagtcgctagacccgccgtagccgccggagccactgctatcgctgtcgctgtcgctgctagagctatcgccgccctttcgtgataatactcccgttgggatggctagcaaggccagggtagtgaggaaagtgtgacgaagtaacattgctcttgaaatcgtggatcagttcataggggtatcaaaatgaaattgtatgtcagctcatcatgccgattgttcgtgaagaagaaacaagaaaacgagggaaaaaactcaacaatggcccgattgggcacgagtatataagcacgtgccttcgccgtagaaatgattcgtattgtgccctagtgaagtgataacacgggatttatacctggttgaccctgaacgccaaggtgccaaggggtggcagcgggacgaagctcgtattcagcggatgactattggacaggaagccatcaagtgcccttcttttggagcaaatgcaactttaatggccgtattgatcatgtgtggattgaaggcttgggggctgtggagtatttgtccagtttggctcgatggatccaagatttccgggagatgtggttgcttctagttttggaatccttgggagggggcctaatcggcgaacaccatgcacaaagccctggagcattgcatagaaatatctcgggttgtgccattgccttgccaaggaccaaggaggttcagtgtcaggtctgtgacacggacccagtatgagatgtcactgttctggaatagaacggggattgctctatcaagcgatccgtcttcttgctggtgcaatgactggcaatgtatgagcaccataactgcgcccaaacactcagagtcctcttgtagttggaagtagtcaaatccccccgaatttagtgctttcgctttgcttgagccgatgcccacaatatcttcatggagatgaaggatgaaggatggaatccagccgaggggtcacacagtcacgggactcacggttgaacttttgcagtgttattgcactctgtctaccccaagtacctgaactcagacctcatcacgaaggaagctgagagcgtcttcgatcagaagagagccaaaccaaaggctctgcatagaaattaaaggcagcgccttctcccatgacgagcaacgacgagcgtcgtttctggttggactcttacaatcaccagagcgcttgagtttttccatctcatgattttatggtttcatttcttctacttgcttaaaaaccattcggtgacactgatactgaacaagccgctaaactttcgactctgtccaagtcaggtcttcacttcctgaccttggaaaaggaacatggggaagcaagactcaaagatcaatcccactccgacttccgcggagaaaatccctatcttctaccatgctctctgtggctcagaagaacatggtatgttgcttgaacaccggcaaatatgcttgagatgacaaggggccttgcccccaagcacacatgatcgtggacataccaaactgagtgcaacatcttgaaaggccacttatggaacattcattgaggcatgggtatatacatgttcatatttacaatttctagctgtccagcagcaccggaaccttctcaaggagatgttcaacaatagcatcggggccacgttcgacctgcaagccctggggaatagcgtgaagcttgatatcgggacgaacagagcgggcaatctgatggatctgctgggcctcctcggcagaccacatagaggcgctgaactattcatggtgttaatgcggaattcccgctcggcatgctcggaattcccgaagccagacttaccagaacatcggggttgtgtcgcttgaccttgtcctcaacttcgtcgatttctatgcaagacttgtcaaccagaattcacccccaacgacgctcaatatgcttactctcgcagttgtcgacgtggatgatagtgtaccgatcgctcagagcctcggcgacgcggccgatgaggcgcttggcgcgctcgggtgcggtgttgacactaaccaggtggaagggacctttaggagcagacatgatgacgggaaacggaggataattaggaaaacacgaccatcgtgggagttctgttctttttattctccaggttgaaatcggccgcgctcgccacttccccacattgtgggaggctgcccctccggcttatccagcgtcggggcagacaaactccgctatcggtcacgatagcccttattatatatggagctctgcgttaatctacttgtatcctcttttttcattctccaattaacaccgtcatgtctaaaatcgcatctaccttctcgcgtaaggactctcaaattgacaccggatcccagactgacaaaaaataggcctggtgcgttttgtccccaagtcgaaccccgccaaggttctaattggagagccagtcgatctccaattagatgtcggattggctctttaccagggcaaggaggttgcggtgcgcccgttctccggcacttcggttctgagccctggccaagtgactgatgcgacggagaccatcgcgcgcattctgtcccctttggcgcaaagcgaggttggaactattcgctgtattggcttgaacgtatgtttcaattgaggggaggaaagtccaaaggaaataaattgctaatgcgcactgtagtatgcctctcacgctaaggagatggcgctcccgatccccgatgtcccgacactgttcatgaagccggctagctctctggcagatccttggcctgcgccaacagttctgcctaagattacgcagcaagataacaccggcgactatgaatctgagatggttattgtcattggccgtgatgctaaggatgtgcccgagtccgaggccctcgactacgtccttggctacacagctgcgaatgatgtttccagccgtacttcccaaatgaatcagagccaatggtccttttcaaagggctttgacggcgcttgcccgattggtatgttcattgacgctgtatgtcattcaaaaagatcgcactgactcgatatctataggtcccgttcttgtttccgctgcacttttgcccgacgccagcaatctccaaatccgtggtcttaagaacggcagggtgatgcaggactgcccgttaacgtacgttagatttgcttcgcattgcttctgatatatggaatataacaccagctaacgtcggatttcatcgcagtgacctgatcttcaccgtcccccagctgattagcttcctctctcaaggcaccaccctgcctgctggtacaattatcttgactggcactccgcctggtgtcggtgcagctaagaacccaaaagaatttttcaaggctggcgacgagttcgccgtcgagctgctgccctatgttggaacactcatcaacaagatcgagcaccagtcatgaatccggtatataaaatgataaatgtggcccttcggggaatagctctctatctacatgtattcaataagactttcagttgctctggcacatcttaaatgctatgttgcatgcttgctgtaataatgtaaactccatgcgaatcttgcacatccatgcatatgttcccaagtctccttagatacacgacacgactatcacaaccactaacgactatcaaagccgccagactgggcatatttagttccggcccaactcacaaggcaagggatgcttcaaaaatgcgagtcaacagcccgtatagagaagctttgaccaatcacagagctcagccggatataaactcttccctgtgcggagtaagtctctcccgccacatcgccctatagatcctgacaagggctaaagtgctcagataacgggagaaatatgtcaataggtaagtcgaaaccatgtatttgacgtttacagacttagcacagttttccttttattggtataatgtgacgatcctacttaattgaataacgtgaagcctatagcataactgtataggaataccttcccacttctgcatttcgtttatagtgcccgaccagacatatttagccagaagcgcaagccgaactgttcacccggcagtcatcaattgcatgacatggcctgtgggcttcattgacccgcgatggttcgatttcagcgctacgggattataccggctcggtgtcccgagttgtccccgttcttaaaagacaatttccggctcttttcttttgagaagcctttttgctggatttgtattgttgattggaaatttcttcccttacttgttttcttcttctctatgcgtcaatgttgttcttggcggtatcaaaatttgatgcctctatgcacattctacagatggtgctgtgagcagaattcaactactctttttttatgctgctattctatactgacagcagattttcccctcgctgattgccaaagctctttggagaatcacgcaatttgtgtgtcaacttatatacaatctcgaacctcgcccttggtcgaggccgatgccgatgccgatgccgaatctcatacgaacccgaacccgatcactctatcttaccggccggtggtctaaacgtcaaaatcgaaacaataaccacgaaatgtctgaacataaaaataccgaaccgaagtcgagctcccgtccagtccctttactcctcgctacgccaaaccttaccccgccagtgcaggaagatggtgggaataacactgacggcgacaaccagcgcggacccaatacccgcgctgggagcaataccgacagtctcgaacatgggagcaaacctaaactgaggttagcgacgacgctgcaaaacaaaatgagggcggcaggcgcgaagaaaacataccagaagggaccaaggaaaccccagatctgtcggacaaaggtgataaagacaccgatgttaccagcttcctgcgggaagcaatcgatggcataggtgatcatgaccgtggtgacaagctggttcccgacagcgccaatagcggtgccaataatgggcgtgacattccagtgcccgctgggcgattcctgtgtgcagaccaggaagacgatcattccgatgatggtgagcgcgaaaccgaagtagctgagccacaggcggaattctggctcggccttgccgccgatacgtcgactacgccggttcatccagaagtctgacaacacgccgcccatttgttcgccgattacggagcctatgatcgcacctaggaactgcatccctagctgttcggcgttgagctcgaacttcttttccaggagttggggaatctcgacggttgcgagaatgttgccaaagaggaagaccattgcatatgcgcatgctgggaggaggatcgaggggtgtcgagccattgtcagtgggcggacgaactcgaaccatgagaatggcgttgggtcgatccgtcgcagtgacatgtactcaatcttcctcgctgactccctgctctcgatgccgctgcccagataaagagtttcagggccgaagaacagatacaagatgaattggccgccgttgatctttggattggtcagctaatggacaggtttattaactacaatagggatgagagcttaccattgctaggatccagtagatccagtggtagccaacgcggtaggtgacgaagccgaaaatgaaaggcccaactgggacacccagggtgatcagcagtgtccaaacgcccatgtaacgggcgcggtctttcttgaaggtcgtctccatgacgactgcactgccgatagcggaggcaggcgaaatgaaaaaggccaccagggcccgacaagcagccagagaggcatatgtggtgcttttggcacagccgatgttacatacgagactgcagatcagagagacgaggaagattggccggcgcccataccggttcgatagcggcttccagaacagaggcgcacctccaaggattgcaatttgcaaagaggtcaggtaactagcatcttgcattccgacgccgagttctttggagatgtccgagtaggcagggataatgccggccgcggtaaatgtgcccatgcaagcgtggaatgccacaaggatgaggttaatcattttctgcgcgttgatacatcagtcttctgtccgagggtcttctccatttgttttgtagcgaaaagaatattgacttaccttccactcaggccagttgtaagggtcagctggactcattccgggaacaggatcaagttccaaagtcccgtgtcgctccatcaaatagtctcggtgtgcttttggcagtcgagcagccattgactcggcgtacgtggctgcccgtccatgtcctgcactctcaacgagatcgatgtcggctttcgtgcctggaacctcctcgccctcgtctcgccgagacgagttcgcttgcaactcgaaggatgccatattgcttgcgtttccggtgagaccagtggaatcagacaagcactccaaggctcaaaattaccctctatgtatgatccaacgtggtattgttgaccgtggttgaaatagccggagggagcgtggggagtattgaatgagaggactacaggaaactggaaactgaaaataatatctcagggtgagccaattgagggcaccaggggcaaacaacaatgaccatagatctgggggcttctgcagctccgctggggacgcgaaatcagcgagggactggtgaaaaatgccctgggtgtgcataatgtggataaccaaggcactaatcacgcagcgttcgcccagtcggatctcccctgcgcctggggttggtattctccggggttctcggctccgttgcgggtccttcggggaggaaatggacagaaaatggggtcatcatggagagaaatgcggaggcagtccacggtttctgattagaaagcatcggtaccagcgagtgaggatgccgctaaataagtcgctgtcatggagtgatgtaaaaggcatcgccatggcacttgaccacggctagccgatgaagctttttcctatacagtacggcttccatcccgagccaagtaccgaaagcctctctacattggcgtcttggcgcaatttccctgggatcaagctatttattttcgctgaattcaccgttcaccctgaggaattctcaatcggacggcatttcgatgctgcatgcaagccgcgcaaacctgcgacgcattatattggactcggcctgagcagtgttgtggagagaatcgggaagaagaccatagtaatcacacttccttggctgtattgccacgacgccttgtttccgcttgaacgcttgaacgcttcaaagattggatggttgacttgaatttgaacacctcttttatttgctggaccgtatacatcgtccgcagtggtttctctttgttcacatattttgtaaagcaaatatgcattcgaacctgtagattcgtttctgtatgtacatggtcttcaagatgtctcaatccctttgctggcaaaatatatttccgtgatcgcataagcagtcccacaccccacaatttcctccccacaatatacccttagctattctttctcattgacaaaatggcgtcaatggggataatgacggcaccgcctgcggtgtcaggaggcaagaaactggtctgccgagtatgccacaaagcattctccaagaccgaacacttgagggtgagtagactcccaaggcttcaaatccaactttcccacgaagtagggaccaccaagtgatacgagataaactaacggactccatagagacatgagcgttgccgtatgttctgattttcagatcctccagtccttttcttgttgtctctgaacaagttccaaaaggaaatatccacccagctgaccagaagacttagatacgggatctaaaccatatgtctgtaaagagtgtcgaaggccctttgccagacaggatgctcttactcgccatgaaaagctgcatgctcgtgctataaatgcaaagaatggctcttcggagattcacttgccgccacatccgacctctttgaattctctcccttcttgggatacgacaagtgcttccacagctgatccggcgtcaacttcagcaacaagtcactcatgggacgagtaccatcctggagaccatgcaagtatgcatgatgttgcctcggagttggactttgagttagtctggcctgattcggaagacttgttccaaagcttgatgtcctcggatacgacagaccagtggcagatgccgcttggtaccttgccgtttccacctgttgtgcaggatatgaatggtatgagcttcgggtctccgaatttatttgatgaccataggtctactgtcggggcaataccgtccggtggaggtcaccaggcagtgcaagatgtcacagagatggtaacgagctcggtgagttgagtgttgcattttgtcagacgagtgggttgttaaaaacctcgatcaagacactggtcgaaccgagatcgatcgaaactgacgttctattttcgtagtcatccagtgttaccgccgccgtgaaagctacatccatcacctcagtattcctcgatgaatgtctccatatgttcttcgttcgcttcatccccacattcccaatcttgcatcgtgcaacttttgttttccgcgaatgcacgcatgccctcctccttaatgccattgctatcggctctttgtacctaggccccaaggtctcggttgcgaagggcgaagccctgtggcgcctagcgcacaccgcactttcgacttcatggcagtcaatgatcacgcataatggcccatatgatgcatgcaagggagttcagctgatgatcacagccctgctgggccagatctatggggcgctatcaaagaaccgggcaattcgaaccactagtcaggtattccacccgcttggcttcttgtgggcaaggcactgcggcatgtatgatagcgagccatactcactggacaacctcccctcggtcgatgcccccgatgcagaaaaagaacaccagtggcgaatctggtctgcgcgggagatccagcaacgctctctgctagcctactatgtcctggacgggcttgtggctcaaacgtcgagtgatgatgcctcttgtcgccatgtggcaaacccacttagcctcccaagtagcgaggaagcctttgatgccagcactgccgatgaatggttggctcatatgcacgcacaaaagccggatcaatcctcattcagaacgattttccgctcactcttcccaccggccgggaacttccgcactctagagaaccgtttctctgccttctcactgcgtgtggtgctggaagggctccagtctctaacctccgactctgatgacaacgaattagccgtgggagttcctagccaatcagacgtccggcgagccctagctcaagttcatgagacaatatccatgagcattcactttactgcagcagagagactcgagattctcctgcgctggcacacagtctgcctagatacaacgatcaactctaccgccctctctcgccatgtctgctcgcgctacaacattgtccagcacgtctctgttggatgcggaaccgtccgtccgggcttcgatctagtcaaatgggcgaattcagaagacgcgcggcgggccgtcctccacgcagtcgccatccaagacatcgtagagcaattaccacgaggtcgcgcgcacgccgttcacatgcccagctcactatttgcagcggcaaccatattcgttgtcttttcacttgcaggagtcgctactgtgaatttgcctcgtaacactgtttggcaagacgctttgctgtcccattcggatctcaacctgggccacgaggatatccggcctcgatctggctcagagacaaagcgctttgtcgaggacggaaatggggcttcctcgcttccgcttcctattggtggttctgtcaggaacctgctttatgagctcaactcaatgcaaaagcttttccggtgcttatcttctcagtggggtattgcacatgacatggaggatattattgcgcaatggattcagctctgtcattaggagatcctgccggacttgatccccgaattgataatgttgatttacatggaaattcgctcgtgtttggcgttggtggaggtgctcggtgaatgcttattgggtgacgcggggatgttcgaaacgttcatatatctatatacccttcacgtcgaattcgaataccaaattgaagaaagttctaggttctggctgtcagtttgttcacctattgtccatgtagtcaacgaacctgtcacattttgtgcagaagctctcgagtattttgcgaactctgctgcatcatgtgttgactttggttgtgctctccctaaaatcattgagttatccccatctccaggtgtaaatccaatgacctcgccagtaaacatctaaaatgaatggcaacactcgtcatgagagggaatatgcccgagattatcccagatggaactgctgacagtactaagccacctcctggtgcggttgcgcgattgctaattcttctgtcactggtcttgcgtaatagccaacagtatgtacctataaatagttacttgatggacttcggacagaaaatctgccggagaaatcgtaaaggacggtcccgatgtcgttgatgtagggttgtgaccacgtggttcacgtgctctgcctttcatgcgcggttgcccttgtgcagctactgtgccctaatttgtgatgtaccgggtgattctagacaagttaatcctaccaggtgttttgaaacgctggttagaatgtcaaataatccctgtatctattgtttatttaccctgattctcactggcgatgttgactcactgattcacgtagaagtgtattgcgcccgaattctaaggcaaggatgctgtagtagatgtgaccaaatatctaactgaatgaaagcaatatgcatccatggatgtatacacgcaaaaagaccgaatctcgtaattcacattaatcgatttctgacaatcacgtgtcagggcccaaaacgagggataaacgcgcctcgacgcgccccggaccttttcgacccacttccagtgtcatttacgctccttaaggttagtccagccactgacattcttaatctccttgatctgtgggtccagccctgtgatatccatccacattcaagccgagtggttcaacccggtggcagcgtggcgtccccatgcccaacaagaccagatgatcgtcagtcagacctaagacaccacaacccggcatcggctccagcgattcccagaatggatcttgcatcagcccgtgggaccaaactcagcgatatagtaatcgatcaccgccccagcacaggccgtggcaagaagcttacccttgcgcaagagaacgttctgaagaggctctatcaacaaaaattgccctctgtgccagatggtgagctgccagcgaaagggttctgggtgaatctcgcgtcgcagtttcgcgagcagaccggtcgtgagtactcatggttgtctgtgaagcggcgggctgctggttggagtcaaaagtccttagaaatcgaccatcggttggatgttagcgacctcgtggctgaggattcggaacttgagcctagtcatcaagatgttgctcgtgaatccccctctcaggaggatccacgtgacagcgaacaacaacctatgctgccatcaatcaaacaccagcgggattcgaccaccctgaagttgtctgaacttgaaaaaagccccggtgttagcgactggctgcagcgcagttggtccccaggcgccacagacccaagcccaggcaccagcaagagtgtcaggtccacccgcatggctcaagcccgcccccgatcaagatcgcccgcccgcgtatcgcagcctgggtaccgttgccgatctccttcaacaacgagccgtaccaaaaccatctctaaacggttgcatcagcagctggcctcttcctccaatgcagtagtcgggcctggcacccatcctttgtctggctcaccagtctatgaagatgtgcagcccagtcatctgagcacacgaaagccacatgaattcaaccgtatccacaggtcagtggagaatggatctgagaatcacgctcgtgattcagcaatatctaagcatgaaaagagtaaagtcagcaccggccttcttgcgtcgccacacttatctgagcaagatgacttaccactggccccaactcgaatcaaaaggaggcgtgttgcaaaatgaacggatccagaactgtccggaggaatgattgaaatatggtgaactcgcatatgaatgtcgctcacagatcagagtgatgcgattgaggaactggggatgaaattgtttgctgctttaataccctcctacatacagaccctgttactaagtatgttcccactccagggctccctattttcccaccaaaactgaccaagtttgaaccctattctctcaataattctatattgtaacatatttttattttttttatcatacattaaccgtggtttttgtgttggtcaagtggaataatgccgtattttatccatttccaacaatacttagtaacgcctatgtacttgcccaggtgcccttccccttcctcaatcgatgccccaaatgagacaaacattctatgtctattttgatgggaaatgagccactatagtgcgagccagcggtgtagggtagggcgatggaggtcgagttctgggaggtccttgacctcatacaccccctgccaccgttggtaccggattccgagagacgaggtctcgataaaagccaatgagaattgggcttggctggttggctgggggttcttcgagacggggcgctgtcagggaatgtcctgggttcacgagggccttggagtgtcggggatgctatgggttacggggagcattggagcatttagggctacctgacattgaaaggacaaggcacatgctctcctgggatcgtggggccctacatggaaaataacgatataacgactaagcgacgactaatcctaattatctgcgtaggtgaatcctgaatgctttaaattgtttgacttgatctcttcttttcctctttcttcctcgtcacttgcgtcacttcacactgctcctccgcatacggaatcatacgaagtttacattcatcctctcatatcatctaccacacgcagtttacattgtttgctccgtcaaaatgggtaaagtcaagtgggatgccttcgctgaccaaactgtgagtctttactttactctgatctcatttcccttttcaattggccttggattttgtactatgtctggcggaaaaaaaacctgagaggaggttcactttcttccatcacacacccaagtgcctttcagattcagttttgatttgatcatctcaaactgtcataaggtcgccatcatgtcttcacgtttacatgcaggatccttcacattcacgtgcaggatctgtgtatgtataactccaagtcggccgaaacctcaatgactcgccgatgttaatgggtcacgcaaaaatataacaatgacagttgtgactgacgaccattcagctcctggccaagatcatcgagacccatgacctcgctctcgacatgaacaaggtcgcatcggcttggcgtaagttatcagtcccgcacgagtgaccatcccaaaaatggacacatggacattctaacatcctctcagctggcgccgaagaaaacagaccgacacctcgtgccctcaaagaacgcatcaacagaataaaggagatcgttcgcaccggcactgcccccttcgctggtgtctctagccagtccactccgaagaagcgtggcccccgcaagaaggccaacgagactcctacttctgccggcccttcgcgcaagcgcaagcgcgttgcacaggatggccccgtccatgaagatgaagtccgtgtcaaggaagaggaagatccggctgccgaactcaacgagcttcttcccgaggttgctcttcagaccgaaaccgacctcgacctcgacctcatcgacccccgtcttcgcgggcagttctatgagcagccagctgatgctgagaacggaaagtctggctctggcgccatcgacccccttcgtcacgagcagatcggtgcagacctagctgatgccgaggacggaaagactgaccctgaatggaccgaatacaatgacttcgagactgagtcggaccttgacatggttcgccagtagctcgactgccattcgcgaagacaactcatgtcagtcgcttgaagcttgggggtcttgagcccccatgatcgatattcaaatttgcgtttttgttggatggttggatggccttgttttgttgttgggtgattcaagtttgttgcttccccaactgatgtgtggcccggtcatcctgagaaaaggaggaaaagaaaaaaaaagaaataggggatgagaaattgcctttgttcccaccgtgaggtgatgaaaaaaatccaaaaatccaaaaaaaggttaaaaagaaaaatggtgcccatttgtctggattgcaccgaacatacatagctgaatgacagtcgacacctcttgtcgagctttgttttatgcttgcgcacaagtagaagggaaacctggtgggatcgggaactagtatgtattgtgagcaaggagacccgactagacgagctcatgctatccgttgtatgtccatctgataaataaccctttgtagattgttcccttatgtgtcccagtatgtgttccagtatgtgttcctcccagttgtaaaattccgtaaaaattccgaaagcttccccagatcatccgaaaaccatcagagaattgacacctcaccatgccaacgcactatggctccgctgtgggggagtcaagagcacggcgatggcgcttagatgtcagaggtatctttctccttggacaagctggagtcaaggaagggatcgctggatcaaacagaattagctgtctgaatttcatccgcatcctgaaaattggcaggaacttactcctcagtatccttgtgcttcgtcttgagcttcttgttcttcgcctccttagcatcggtgccctcgtccttaggagccgggccttctccaccagactcggtatcagctcccttggactgagcagcagcgcccttggcagacttcttgggggtactgcgcttgcgcttggccgtgggtgaagcaggggtagacgaggcaccttcgtcattcaactcggtggccttagcccgaagacgactgatacggtggcggatggcagagacggtgactcctatagaattggtttagcatagtgcatacaaaagcctgagataggcggggatgagggtaggaggaatcgagaccggattttcagggcagattgtgcacgagagacagtcaatgggtggaaattgatggggtatgagcatgcataatgcaaggtaggcacatggttcagcgtataccaccaacaaagaaaataccggatgagtgagagggccaccgtaatgtattcgcatgtgagtactgcaggcaaatagctcgcaacataaaggattggtgttatactccatgattcaggggcagggggggttagtacttaccatcacccatgtaggctgcgagagcattgaaatcaatggggttggggctgatggcaagtatgccagccagcaactaagtgaataaatggttagtaattgaaacaaatcacgggcaaagacagtctgggccaatcttgggaacaagtgggatatcaaagccattagcggtcaccatagacctgcccgtcactttcccgtcactttcccgttataagccagacactcagcgcaaccaccaaggttatttaagataggaacaaacgaaaggaatatcgggacaccgaaaagtcgatcgcatagaggggggtccagacgtaccttggcatcagccttctcgttccaggtgattttcgtcattgttagggtcgtcacgcgggctatggcaaacgatatcagcggttgatacagaagtgacgtgaaaacgcgcgtagaagtatatacttctccagaagcattcaccagaactatagataaacacaccttgttcgttcgatactttaaagtcgatgtggtatggaagtgcagagatgctttggtcaagagcagcgtgggaacaaacggtgaagtgagaggttggggacgggacggacgagatatagacgtttgagggtcgctatctagggcacaaacaagttgctttccccctttaactttgctttatcgtcactataggataggcggtggtactttgttgtgagtatttaaatactaagtactccatatcttctcaatatatacgacgaaacgcaccactatcactaccaccactatcagcacgaggacaacaaggacgacgaccaaacagcgaccaactacgaccaaccaacgaccaacaaatgaccaacaaacgaccaacaaacgaccaagaaacgaccaagaaacgaccaagaccagaacgacgacaagaacgacgatgactatactagtaagactttctgatataatacaggatcataaagccattcagctgtgtagtagatcttccagaatgatgctgccatagaaacaagaccaaagggacgcattggatgttaagagcagatgcaataacacgctggttgatcagacgaacaacctagggctagatgtgaacagttgaacacatggggagtctatttacttataaaagagcttccagtattctcaatcacaatagtgtagtgtccataggtgcatcaacttatccggcaatattaacgtgttacataaacttttgtttctactgttgctatgtgacggagtggcgcctgcaaagcatgtccagatccccttcggcagttggggatgcaccgcctgggcaacacacatcgtaaccgccagattttatgtagatacttagcccactctacattaagaagggccgagggaaatagtgtgatgaacggaatctacgttcttctgggaaagggaagttcacgatcaatctgctgtatttcggttcaagaataccgcgtggagaacaaggaacccgagacctagactaaaggccaagcgatctcttctctcgttatgccgcagaaaccaccccatggatgtcagaatcacgatcatcatctcccaaccaataccaggtcgaagaagcggcccctagagcttgcgctgcttagtgggactggggcagggatcctctccatcgccattctgaccctcaacaaccgaatctttctcagggttggtggccgaggcggtcttgcgcttagtggcgggtttggtaaccttccgggcacggcctgcgggcttgtcgggcttgtcggtcttgtccttgttaggagattgcttagagattccctcttggcgggctttcagagcgtgggcgtgctgtctcacagcagcagtgctgtcgcctatattttgttagttgagttcatgtaatgatagtgtcttgacagtttagggtgaagaagttcatggaacggcaaaaggtacacgtaggaatcatagacgtgacagccttgacagatagctctcaattattttactcaccttgtcccatcgctttagcaatagcggcaaagtccagcggggaatggacggccagtatggccacaagcaactaccaaatcatcagtcattgatcccaagacctggcagtacgagcaacagagagccagcttgggtaagaaaagtccgagaactcgtattcccggtgttgtcgccgggatgtcagtgaaaatgagtctgcttacctgcttgtctctctcatggtcccaggtagaagccattgtcttgaaaatggtggtagagttgaaaggggatggttgggggatgtgaaaataacggggatgttatggaaagaacgagatatgggagaggaaataggcagaacgctgaaaatatctgaccaggttttctgtgagattccgtctacgtgaggacgaagggcattgtccactggaactttacaatcagattcacgtctcgaagctcatgctacttgttgtgacagacagcacaggcggatgcctagttggtcaggctccatcttgctatattagccagctcctgattgttcatagagaactcaatcctagtcgtctgatcactactgcctttgtgtcgatgtcacggtgggtggatgatgtgatgttctgatcttctgtgcatcatacatccggacccaagaatctccctaacgcccgttttttggtactgcatggagctgtaatgcgttctggcacagggagctgtgctagctagaccgaatataatttggcacaaaactcaatgcaagtaacgagttatatcaacccgggaatctatactgaagcacaaacaacgcagaagataaacatgtccataaagccgctcaaaaaagaaatcataccctgtgttcccgtccaccacaatgatggacataaacagcaccttggtgcctacaactgtccagcagaaggtggtgccgaggtccatggcccactgacaaaacgcgacccagaatcttttcctgcctcccccagtgaatgtccgagatgctcgggataatgactcgactggtggtaaggcgcttggtgaacgtgccctatttcagaaaaccctgtcgaaccatcgctaggaccaaattgatgttgcgaaacatattggttggcattgactcgcgtcattgggttgtgatattgctgatggccttgggcaaaatttgcttggtacggtcctgactgttttcctatcatgtgctgctgttgatattggctctgtacatgctgcagcggtgagaatccctgcaaggcagggtctgtgggagcatgttgcgaatgggaacgcgggtccggctggctttgtccgaatctaccttgctcaaccatggagtggggtgaatggttggggaaaccctccgcggcagtttggtagtgttgcccttcctggacaagagaagggttcgagacgcggcgagagaattcttccggagacggttccccatgctggctggacgagtaagacccaaagaagggcttagacatggtcgatgggtgtaggttcaccggggcagcctcaccagaggcgttaaaatggccttgcgattccaattgccacggtggctgagaatcggaagctccttccattggccttgccatttggccctgcgagttgctagttattgtccacgatgctggctggtggtggttacgtaatccagcaggatcagcagaaaatccttggaaggattgtgcatgttgcgccatgttgtaaccgctttggtgtccctgataggtacctggattattaccccatgctgatgaggagatgttttggcccatgtggtgtggacctgtcatttgataccccggatgtgtctggcttgcatagaatgcttgctgaacaccattcattcgtccaacagggccgtgttgcaacgaattctggatacggataagcatcatgacggatcaatatctgtcggactcgaacatttaaacatacctgcccatatccggttgcgtttgcagcgagctgctgctgatatccgccgagcaagtgttgaccggtttgactcgaataccaacccggtaccccggaagacccataagttggattgtccgactgcccgtatatctgggagtcaagggagctctatcctaccatcagtgccattcttgcaatgcttacgcagacataatgagcgcgattccctacggaaattctcgcactgtccgccgcagagtacgtcccgcctgccgttgtgtccacggactccagctctcgagtactgttgcttgtcggatgcgatcttggctcttgcgttgggcccactcccatcggcgtcggtgttgttgacggggtcaggacgaccggttcggttgggacctcccattgcgacttcccggtcgtccgctgtacgtaataccatttccgtccgacaccttcccactgagggagcctgtccaatgttattattagaatacagcgagtatgtcctttggttctcggtgttgacttaccacccttctgggagttgtggtggcggggaggatgggcctgcggtgtccgcaggggcctcaggcgccatctcggacctaacaggatccagccgatgtcagaatgtcgaaaggaagagtagaggacatccaaaatcttgatacgaacttataaaatgtaaatatacacggaacaagagcgtggaataaacagatgtgaggttcaacgagactcgctgataagacgatcttgtggggcttggcctttgatcgccgtgcacagaccgagtcgacccgtggacaccgcaactacgcaagattctatgttcataatgagacgtattccgcaatcgttattatcataaattgctaagtataattgtagaaaaatatcaaatattagctcctgtctatcccccagcaccgaatcataaaacatatcggcataaaaggaagaaagaacccacccgtccaagcgcatgatagagcccgagagacgacatggttatagatacaaaacggtactgctgttgggatttcgccatagcttattaccccgagcgtccctgggttggctagaagttcattcgcccgcccagtcctcgtcgccactgagttcatcatctaggaaatcctcttcggtcagttggaactcagtcggtcgctgattgtcgatccgaatgttcacaatatcgcacattccttgtaccttcccggcttcagactgtggagtccccattaacgaagaatcactagcagcatcgtcagtttcgtgggttctttgacgtgcaagccgagtgctttgtcgtttagaggaagtcgatgggccactatcagccgtggatggccgtgttgatgacccagcatcaggttcatcggggtcattccttgtgggggatgtggtgggtttgagggagcgtttctgaagggagcggaggttcgggtctggtggcatgcttcgtcgtaggaataccttttcgaggaggccgatccaccgctcacgaaaattggcacggtcacgccagccaatctttaggattgcactaatggtcaatcgacgtagatcatgaagtttaggtgccgcattcaccagcgaagtgaaaaagacctccgcagtagcgtcgtcccatttgcgtaactgggtgagctcgatttctcggagctttactggccatgtgggaacttcggtttggacaagtagagcttcgaagtgtggctcaacgtcgcgataactggacgcatcatgcatagaaaggtccattttgaaaacttcgagattctcacagcaatgagccaaattttggatgaaagacatgttgagatggcgattgtggcttagactgagctctcggagattggtgccatgtaaggacagataggctgtgagatcagatgaccacaatcgatcacagttgttcagagtgagcgaatggagggtatttggtagattgatcagaatttccccgctgaccaatgagctttcaataaactccagtcgctgaagctctggaagcatatcaagggcttcgaggagaccagcctctttggcagcggaagtttcttcatcggaattatcgaaacggagcaacttcagctccttcaggccctgaaaagcgcgccgggagtgcattctcaccatcatttcgacaagctcatcagtttctaagaagcgactgttccactcccaactacggagggtaatgccgcggttctcgattgcggaaaagagagcgtctggataagtccactttgattgggcaatctgccattgaggtattcccaccgtgtaatcatctttgtggtatagtcgtaccgtgtgtaaacgaggagtcttttcaatcagttgagcaaggtcgaagtatccaggtccacttttataaacgagaattggttcaacctcaacatggagttgcttgatcttgctagagtagttcatcgagagagactcttgtgggcgttccagcaaagagaggagcacatggctcctgggggcaggaagaagagggggacagtgatagagtgcggccagcgcaggctcatgaaagcttcgacacagcaaagcgacattgaccagccatttgacagagtcattgcgggtcgaacggctttcgtcgagtaatggatgtgatgcgcgcaagaaaatgtcaagaagaatttggtaggggagagtttgccagggaggaatgacaccggaacccagaaagatcgggtcatccacatgtgtcttggcacgcttttgcagggcactcccaatttgattgggtttcgatcgtttggtctgctttggcttcggggtggttgcagcgcgccgaggaggtttgggtttggaagtgcgggtagtcacagatttaggatccgggtttggtgcatccgggcttggtgcgtcgatcggcgcatctaccaatgcatcggactcttcgtcttccacagccccatcaaagctagcatctgtcgaatcttcacgataggacttcggcattcgagttgtactacgcgacctaagagataacgaggcacgccttgagccagacattactctcgattcatcttgagatgagctttcctcgtggtaggtctgcaccttggtgcggctggaccgcataggtcgagtggaccttgagcgcgaactcgagggcgccatgacggataagatcgcgctaggataagagagtgggtagcagagacccgagccacattgtacgcacgacgtcgcgcgcgcaacaataagagcagaaagtcaatatcgcttggcttgtggaggcgacaaatatgcgattattgtcgttcaaattgacccttgcgatggtccgggtgagtccggtttcttttgacggatgatgtcgaagaggccaagaatgccaagacgacgggcttatcgataacacctaggatgtgccaagacgagttagccttattgaggttagctcacacgtgatagccaggcaggaaccccgccctcaggccacggcactagtcctcattagggagcactagatggccccaaaatagattctcagcttgagctttaaagatgggcgcttccagccacctcgaggggaaacctcctggaaccctgcaccatcggcgcgttgctgttcagcatctggttttcttccctttttctttgtattcatacatcgaacattttgtgttgaagatagcctacatctattccgcggctcttaatttgacgataatgacgacttgcctatgcgacctaggatccgcttgattgtttgcctgcatcgcgcttctagctttattctacaattaaatctagaagtgtgtcgctccaaatcgccaaatttcagatggaaacatcatttcctgttatcatggactccaccgatcgcccgagccgtggtgagctcggcggaccgcaaatggtcattcaacaatatgcgcgatatcctccgacattggaatcaacgttgcagagtgcttcctccctggggagtgctcgtagccaaatagatatcaacaaatcgccacctttacagcgaagagaaacccccaggagcttacagtcttccccgaggggcatgcgttctgctataccgccatcatcggccaaccgctccggaacatccatgtctccaccattattcgatcctcatcgccatcagccgatgaaagatcctgccgatcacgcagattcccgagttcttccgtcacgggatatcactgacgagacgatcgatgatgcctatgtcgcattcatcttgtactgcaatcctaatgttccatcctcagttgacacgtcagatctgcgaaagacctttcggtgtctcccgcggagtgatggaaagagcttcaacatctttaccctatatgggctcattcgaaagcggctgcagaatgaagagttgaagacgtggatccaattagcaattgaattgggggtcgaaccacctgacattgaaaagaagcaaagcacccagaaggtgcagcagtacacagttcggctcaaggtacgtctgttatcaaacctccagcccatatttcgtcttgctaatctcacccagcggtggatgcgtgctatgcatatcgatgctttctttgaatattgcatgggattgccccattcttactatacgcagctcccaccatccggtcctttcgtcagcgagtcccgcgatggtgtattattggaagaagatctcgcactcagggcacttgttccacaatggaagccaaagcggggaagaaaaagggttgaggataggtacatcgaggaagacagagcgatcaagcggccccagttggatacgtctgttggcaccgtacagcagggtagttttcagtcccattccgtaacattcccacagagtgcgattccattcagtgcatttcctgatgatatggaaccaaacgacccctggacagcggcgacctcgtcatatccgaatggttcagggccggatcagccaagtcaagatacacgctggagacttcctgaccgggatgcctctcctgctaattatccacagtctgctatcatcccacggagtcatctaccatcagatgtccacatgtcagccgagccaaggtcggcagtcaccccgtcaaccggtgaaaagagccgttctaggagacggcatggccctgcagtttcatctgcttggccgaacagcaacggcttgtccgctggaaaaggccgaggaaggccaccaaatagagggtcatcgtcgggttccttttctaccttccaggtcaatcctagtcgggaatcatcacaagcacccaacccgaataatcaacctccgtcacttgcccttgagagaaatccgccccaaatatttcagaccccacctcacaatcagcctccgacgtctgtctctcacgggagaccgaataaacttcaattgcaggtccctcaacattcaggggcaccggttcgactagccacaccaccgagactagtagttaatggtgtgaatggtgctgtcattcctgggtctgaagagcccaatggttcccgccaatatcccaccacagatactccaaagaatggtatcactagtcagacatgctccggtgggcaaggcaatgcagtcgctactacaaatccctccatcgatgacattgttcatgtactttctgcagagcttcttcgtgctaggctgacagggcggacggggacgctcggttccaatgaggcgggtgccctagcttcggcgatggtgatcaatttgtcttcattatattctcagttccaacttggaaatctttctctgctactggcttttcaccttggcgttggtcatcatttcggattcgcaggcactccagggtcactggttgtcaaggccgagcgtgtcattccaagcagcgatggaaatgggggggcttcagcctccaacgactcattcagtgaggtccactataccgtctcccatgagtacaaggcttcaaaccaattttcgatgcaaataacgctcgcaaatgtcaatcctactataggagggacaggtgcgtctgaccacacaagcgcgattgtgggtccgagtcaagagaatattgacaacgataagacggtggagctggattctgacgatgatgatcccagccatcctgtttccgaggcaacatggaagcagcgttacacaagactccgtgctcagatgcagaaaaaggagcaggctttgtcacaatacaaacgaaagatcgtggaatctgtgatggcggacatataactcttgtcaacggaatgtctctcttagacttatgtcaagatcttagcgtcatgtttttgtccatttttgatatctactttgcaggccccttttgtttttgttttttcgataggatacccctttgataagttcaatcctactgtttgaatacgcttcaatgaaattcactacgttagccgctctattgaggctggcttgagattcctttgccctgataccctatgggaacgcaatcaagagctatggatagaataactagtgaatctttgggtttaagcattccttagtccgcatactccctctcctcctagagaacaaaaggatatcaagtttgcttggaaattatgctaaggtcaatcaaggtgctttcatcgcacagcttgatgatgttactctaagcaatgccactgtttaattgtatttgaacaaataattcttcttgttagccaaaactgtagtcaaatccagtggttttacctcaagaaggagccctcaagtggcacctgggaccgtaacgcgcgttgaggctcatctaaagacaaatgcaggtccttgcctccgtcctctcctatcccagccatcccgcttctatcatcacatacgtcactacatcaaacagcaaccaattcaatcgtatgatcctgccaaaatgacttccgtcaatacacccgaggagcaggccatcgcctttcttctgacctgtgtggagaattcccagaagggcaaggtacgtaacacctgatttcaagctcgctctctcacaatgtccacaaattacgacgtttccctacccaatacacccgctaatcttactggctatgtattacagatcaactgggacaacgtgtcactcgatatcggcgtcaatatgacacccgaggctgcgtaagctcttccgctatggtacaagttctattgcaattattgacaatcagcagcaggaaatactacttcagcatcgtaaagaatgccaaagagtttgagcgctctgacaaatatcccgaactccccggagacccttcctggcagtccatcacggccgatgatgctgagattcccatcatcattgtcgaaggccgaaatgatatcattgattagcaaaggtacactttggatcttgatccattgtcctcacaatggcttggaaatgaagataggtatctttgggttctcatcactgcgcggtctttgctgttttctggttcgagcactatctatctagagaactgaatactatgaatttcaattatccacatcggacgatagtgacatcggtactggttaattccgactacacaattgacggttagaggagcctctagagagagacctggagatcaagaattgcgcttccaaacgtttgtacttggtgactcccctacaagaagtgtctctcattaaaatagagcgcatattgaattagaggctatcatcttccgggcacctaccctgtagcttgatcgcagaatcctcgcacaccgaagacctcttttgctcgagttttggcagatcaggcttgcatcttcttcttcttatcgtcctccgagcttttgcccctcttttcggtggcaattttgtccgaatgtgtcttcaagttctcgctcacaatatccatgtcgtctttctcggcttcgagcgtcttggtttccttcagcttcggcttcggcggaggctgggccactttgggggaagccgcctcagtagaagaggtttctggctattcgattaaattagttaagatgttatctggatggagagaggtcggcttgccttgtcatcgccatagatatggccgttggtcagattatgcgctttcttgagcttggcatacttcttctgaaacgactttccactagcatagccgaagtccttggccacgagcgcaagattgacctgtatatccagttaagcatgtcgacagttggttcaagccaaacccccaccggagtctttaatgcgtcgtaccttgttggtttccttgtcggtgtgtttcttgatcgagtctagatactcctggtccggagggtcgttcttgtaagaaggcattgcttcggcgatctcgggagggaatctccaggcgccttcaataagggtagatgtttctgaagataaatcaaattttgggtggaaagcaaaacgacaagtcgcagatcgccctaggagacgtgtttaatgcttttaattcgtttggctcgtttggttcgtttggatgccctttgatgcattttccagtggacgtaaacgtcgattatatcagcgtttgggcaggctgctgtattgatatgagctgagttatatcacttgtcgaaagtcccagatttgctattcttggaaaaagttcgctgaacggaacgtggagatgtatgctcacagcgtgataccaggatttgcttaacgaggcacagttatgatcaacctatcaatgtttatatcatatccaatgacttggtgaaccctaggtcagttttatggctatctatgtgcgaaggagacgggaaattgctaatggactgggaaataacatgttcttgctcaagacttgatcatatatcgatccccgaattcctggcgccagatcgaacatgggactcccacgatacttgtaggagacataaacatatcatgcttaactttgacaagcaacaaaaacgcagagactaaatcagcaaactctatgataataacgaggggtactagctgatgaacaaatgaacgaggcccttctagtctctaacaagacatgatctaatcttggatcttttcaactttgacaacaacctggtgatcttcctggttctgtgtactcggtgccccctcctcggtctctttttcttcttcaactgtcacagcggggtcttgctggcaggtttgctgctgttgctgttgctgttgctgttgctgttgctgttgctgttgctgttgctgttgctgttgctgttgctgttgctgttgctgttgctgttgctgttgctgttgctgttgctgttgctgttgctgttgctgttgctgttgctgttgctgttgctgttgctgctgctgttcttcttcgacttttacagtcgggctctcctggcgaggaggggggagtggttcccagttgatggttggggcataattggtgaaatggttgatttggtcaaactccctaaagtcgaaagattgggtgccgggtgctgaataagggtaaccagttgacgcggtcgggaactcgtatggattcccatgcatgaaggacaatgatgttccgggactgggagacggtattgcagatggtatgtttgacgccagctggaattgcgtcgaggcaaaatcctgaggaaaataatactgtccttcggtgctgtctaacatcaactgcggggaatgctgcataaagctctgtatgttcgcattgccttgaatgcccggttcgcactttacgaagggattgcccggaagagaagaatcagtcgattccatgggcatcatgaatggtggagccatgggaaatatgccttgcatctcagcagggggttccatggtctttcccttcttgttctttcgctttggtttgctcgctcctgttgttccttccatctgttgtcggaaacgggaataccgcatacgagcggcatgaccattggagacttcgacctcggaagcgaccttattccagtcgacctatattcaaaataagatcagatcaatcttcagttaaaggtagggcaataaactgaccgacttcaagtccaattgcttgatgattgtgtagagaaactttgcagtaggagtgtctgtctctaacaccttgtttcgctggcccatggtggaaaaatggtctcagttgcagactgataaaggtagagttgtgaggacagtgggatgaatacctaggtagttattcgtatcggttatataactggtatagaatgaaaaaagaatcattgggtttgccggccacatcaatgcttgctttgtactttgaaaatgtaagagacaataagatatgtacggactttatgcctcttctgtcaatctagtttgccttcttcaaacccaatttcatcctgcaacatcccgcctgcttctttatacttatgcttcaagtgggacgaatcaatgaatatttgtatttatagtcaaatggtcaaatagccaatcaaaaatgtaaatataaccctctttctttaggttttcatagaaagtatacgagggcaaacctcttggaagcagatgctcaggtcgttgtattaaggtacacagtggtatatatttgccacgtgatgcttattaccctagtccaactcacctgggcatatcgagggaccaatcttcttagtgagaataagaggatataactagaaacctaatgtagagactgcatgaaacgctatatagctgtagatcctttgtgaagtataatgactcattgtggaccatgtccacggctatagaactgcaaaacggttcttgatgctaagacaaacatacattgtatatacctatagccaagctacatatctcggaaaaggcgcgggcttccaaccctccagacattgaaggtcaacctaggcacggggtccacaggtccacggcaggttgcgaaggagcacctgggcataactacctagttagtcaactatagttattgtcaaaagcggtctaaaatcaggcataaaccaggcatttaaggcatcaatcctggaaaatcaggcatttgacctttggctgttccacgggtggacctaactttggaaagccaccggtatcctcgactcgatcaacgacactgattaaataaacgagccaaacaggcgctagctcctccttccaagggaaacggaaacatattcttgtcaaaattgtggctatgactttagtagctataggggcgtgctaccttgacacaattctaacgtgagttctgtccgtaagtggtttccatctggagagtggtattcacatgcttcgattagagccccatattaccctggtgaagatgagaagcttcgtgcatccagaatcagtcgccggcgcggtggaaactgcccaaacaccctcgaagttctagggcagttgttacagtacgggccctcgagtgccgaatcatcactgaatctcattgctgtcctcccctccaaaagctcagtaccatgtcaacaaatccaatcaagcttggggaatatggttcggctagataggtgcatttacagagaggggttcagtaagccagcttccagttacattattacaagtcaggccaccggtagtaggacgattgtcaattacaacgagctgccggaaatgactcgcactgagttcgcaactgctgttgagcccctgcgtgcggtaactgatcgaccctggtttcactttgaggtgcattaaatatttggccaggtgctcagctggtcgtgatacacgctaactcggactcagggccgtgcaccagatgtaaccttggaatgtattcgttatcttcggaagtattttccaggggcggaaatcagtgttgaggtggaaaaaccaggccggccaggcttgcaggagcttgcagacgtggcagatgttgttatctactcgaagggctgggcccaggtgagattttattttcggctctctaagcacatctaatagctgagcagagcaatggatatacatccgctgaggattgcttgcgggatcaatcattgaagacaagccgagcgtaggctttactgtccaaatcctcagagcaataatctaatctacggtctacagatccttgctgtgctgtacttggggttctgacggggctgcagcacttgaaccaaaaattggcaactttgctcatgtcccggcgcatactgaagaagcgggagtcgtcgagtgagttttgagctttccaatgtacaacagcaccaattaggccatactaacagtctacagcaccatcggagctggggatacatttaatgctggcttgctatacggcctcatttatcggggtcggtattggggtttccgaaagaaattggagtttgcaaatctgattgccggcttgaaggtcacccaagagggctttacggaactgcaaagagcgttgaacgttccatgatattgactcgccttttcctcaaccgaattctgtcggatctttgaattgccgaaattacaatcgaagtagttgtcttttgtcaggtcaatttagttaatgtgcaagaatgaaacacatattttgacacaatgagagacttttctggtctgttgaacatcagtctatcttttgaagtgacattgacatatagatcctggagggtaagtatgaaagaatatgctgtagttcacatttcccaaaatcataaagcaagccggctatgaaaacaccaacaagcacttgttgcaacaaatggaagtttggcaggaaggtcaggcggtaaagagcagcaaatagatcagtcgcccacttggcacgtgatgcaacaaggtccagggcggtggaaaacaaaaaatattctgccatcaactttttgatcgcggccttcttttgcacgttcaatttcaattccattttgacacaatcaacagtcaccatggcatcagtttacaagagtgtctcaaagaaggcggctagacagcccactgaggatgtgtccgacgaggatatggagatggaggagctcctcaatgcggaggacgacaccaccgatagcgaagaggaggagtccgacgatggcgaggcggctgaggttgtgaagaagcagcttgcttctggatttatgcccaagacccgagtacttatcttgacctccagaggcgcttccttccggtatgagcattgcaccttgagatatgttgcatgggtttactgatctgacaatttgcttttctctagccaccgacacctcatgtccgatatctgcggcctccttccccatgcccacaaagagactaagctcgacacgaaaaagaaggccgctggatataacctcctcctgaactctcttgccgatctgcattcctgcaacgttatcttcttcctcgaggccaagaagaacggccaggatctttatctctggctttcacgcccccctaatggccccactattaagttccatctcaacaacttgcacacaatgggcgagctcggcgctggattcgcagggaattgcctgaagggcggccgcggcttggtcgtgttcgatcggtccttcgacgagcaaggcccggatatgggcgctcctggcagtgaataccgcgcgctcgttcgggagatgctgcgcggagttttctgtgtgcccaagcgtggtgtcagaggcatgaagccattcatcgaccgcatcattggtatctttggagtggacggcaagatctggattcgcgtctatgagatccgtgagtctgaggctggcaagaagaaggacggcgatgagactatcaagcccgtaccgaagggcaaggacaacagtctgcccgaggtttctctggtcgagattggcccccgtttcgttctgacccccattgtcattctcgagggcagctttggtggacccgtcatctacgagaacaaggagtacgtcagccccaaccaagtccgtagcgacatccgacggggcaaggctggccgttactcccagcgccgagacggccagactgatcgggtggccaagcgctccgatctgggactgtccgagaactctgtgcggaaggtggatgcattggatacaaggaagctatttgcatagggggtttgtgtttttgtttcgtcgtgctatttctagacttgatatccctcgggatgatgtttcgactacatgtgtatatttgatgcgacgatttcatcatggtccgttaaggcgtcggggcaaagtctcatcctggttaatttcaaaagttgattatttctatctgttcctttgttttgcctatttcactgccatccgaacagctttttctacagaataacaggcaggttggtcccatggtccatcatggacctcgggacgcaaggggcaacattagctaagcgccatataaagccctccctggcctcgacgccatcgcccgaacccaagtctgtctttgcctcctgacaccatctatcatggcatctgtttcgttggctagccctatatggctacaaggcgcttgctcttccaatatgtttacttctgaccctatgctgtcccttccttctgttagccccaacggcggggtctatatccaataggtccaccgtacgcgtgataagtctacgagttgctgctcgcttcaattcgtgacaacactgtctaaatcaattcatttataaatcctcgaaaatcagctatcttcttccgaattacctggcacaaacccctcatcaagtaagtcatcgctcattgacactctctgagtcactctaatggtgttttctttacagcaaccatatagatctttccatcatgcgaattgatcatcttgcaacggagcttctgctccatatatttcgatcatgcgactcagtctccgatgtcttgaatctatcagtcatctgccgtcgactgcaccgcgtcctcaactcaacaagcaaactgcatatcttagccagtgccgcggagaccgaatttggtcccctcgtcgatgccattcaagtagtgacgcaaaatgaaagccagcccgctcatctcatccgacgtcctcctatgtctgatttccttctgaaacaagtcattcagctgggtatggtggcgcgaaaatgggagacgatctacccgtttaagaagtggaaggtagactttgagaatcgtcgcttgctcaccgacgaagagcgattccggctgcgccgcgcagtataccgactatggctgtatcacagtgcattccattcccatgtttatgatcgctattctcgtagtcttcgccatgtggtgttggagcgcgctcagttgctccacaactggtccacgcaggagctggccgagattgaggatttgcgtctcgtcatgtgtgatattgtccagaaccacatatgccctagtaatgggaccattcaacgcaaattccgcaagcgttatccagacagcagccagcaactctcgttcaatatccacctcaattatcctccactttcaactacttgtctgtcttcccaaggtcacaccctggttcacaaagaccctgctgcctcgattcaacaatacttccatacggcgcatccgagtaattacgccgaatcgccagccaaataccggtctcggtttcgcaatgacctctcccatgatccaggctatgaaggttggggtgatgagatcccgcattactatatcatgcaggacatgctcaagctcgatcctggccagattttatggctgcgcgaccatgctttgctgaaggaacaggtagaggagtatgtctggtctctaggggaatggttccgcaacaacggcgaaacgtttggtgacacgttggaatacgttatgaatgaacgtgggttcgaggtcggagaattgcgatctgcagtggctgaccgtgacatgggcattgtcctagactagatttgtgcttgtcttgtttttgaatctatcgaaatacatatctgtgcatggacttttaatttttcttgctgtacgacataccatatgggtaaattaatatatgaactcacgcaaatactcgaaatatggaggccctgtcggcgctgcaaatcgtatatacaacataacgatctcttactagcaagcactgtctatgggtggacacccgtggccccggggacaggcgctagtcatccaattcgctataacaggttagaccagagaagtaaattaccttgtggagcacgtggaccctttccctcatgacacaaggcattcacgctttttcttgttggcattgcacgactacattgtacagttctactaaatgggtggaatggatatacgaatttgagaattttcatacaaaagccacgcagccgcaatgttagacgcccaaccaagctgtgttcaccatcgtagaaacatatcacacccgttgggcgaacgggaaaaaaaggggatcaatttccttggggaccacgggaaaaaaaaaaacgaacaagagaaaaggaccgaaggggaatccggcagctgataccatcaagtccggtaaactcctattcttcccgtgtggcttctctagcagatcccgcctgtgtatcatctttgtagccatcgaatttcagactcccaacacatatcaagaccatctcaacgtcgcatcacaaaagaagagtcgtggcagtcggtgcatcgtccttacgaagggtaatctagcagcagccctgcttctgctcgctgtcttgcttgctggggtcgataacgggacggcggtcgaggacctgctggccaccctctccgttgtcgagagccttgctggaaacgatgcggtagatttctatcgaaattagtcttcaaatgccaaattctatgaaattgaaaaccaacctgtaaggatgttctggaaggccagctcaacgttgctggcatcaagagcagaggtctcgatgaatgaaaggttgttctcgcctactgaatgtcagcgccacactatgaaatcgattgtcgggaaacgaactggcaaactgcttggcctcctcggtggggaccgcacgcaggtggcgcaaatcgctcttgttaccgacgagcatgatgacgatgttagagtcggcgtgatcccgtagctccttcaaccaccggttgacattctcgtaggtctggtgcttgctaatatcgtaaacgaggagggcgccgacagcgccacggtagtaggcagaggtaatcgcacggtagcgctcctgaccagcggtatcccaaatctgtgccttgattgtcttcgaatcgacttgaatggaccgggttgcgaactccacaccgatcgttgacttcgaatccaggttgaactcgttgcgggtgaaacgactcaagaggttagatttaccaacaccggagtctccaataagcaccactgttcactccacaatacctccgcggtcagcctcgggatcttttgtgaggggcaacaaggggtggtggataagacgagggcgggcatcagcgcaaggtggcgacgttacctttgaagagaaactgtgggggatatcatcgtcagcatacagttctgaaatatagaggatctagtcgtcccaaatcaactcacatcatattcatcgttggccattttgaatgtggtcgagctagtacagctcgaaaggtggtatcaaagtacaggtaaacgtggcgggcaagtgaagactgagggggtgtacttggagacttgagagggtgaaagtcagatacgtcagtactgatctcacagcaggcagaaggaaaaccaggggagcgcacacacgggaagtaatagagaatcagcaggggatagtcagtgatacctgggccgagtgtctctccttaatcgtgcccacccattgtggattagcgcatcacgtgggttggcgtttggcatgcgggcggtatcttttatcgggcagtaattgtaactatcaaactttcttgttcttgctcttgctcgccctgctcgtcttgcttttgctatgtcctcgagtgttttccccttcttttccctttcatatccaccatatccaacaggcatgaaatacggtaggcactcgctctatcttaatatcctgagtactgccttgcttgtaccttaagcatggcgtattggacgctgcacaatgaagcatttgttgacttgattcgctaggctactacaatggcatcgcattctgaaatgggcgatgcccctgatcaaaatgaaattggtgatgtcgactctctggcatctaccgtagaaagcgacccggaagcggagtacctcgtgaatgacatccatgcggaacggaggttctacgtagaaccagattccgaggatgacgaaggtgtctttattactcagtatttggtcgagtggactgggtacagcatggataggtgcagctgggagccgagggaaatgtttacttcggaagagaccctagatgcctgggaaaaaaagaaaaagcaaattgtcgagggcaagcttaagcctagctttaatctcaagtcatgggagaagaagatggctcagttggagaagacgacaaaaaagcgaaaagaagccagaaggcgtaaacgagagcaaagggcacgacagaaaagcctccctcaggctgaatcatctcgactggccaactccgatacgatagatgcgcacgagcccgaagcaggtgttgcatctgacagagctcccagtcctccatccgtggattctaccatccaggccttatttgttcccgctgaaactccgccgccatcaaaagctgtggctcgccagtcgttgcaacaaatagcacctccaacatcagatacatcgggtgcgcaaacccctgggaacgagtcgccaggatcaacaaccttggttccacaggcagaaacaacactagacaagccaaattcacgactcgcgaagagacttaataccaagcacaagcccccggcgcgcccgaaaagccccccacaagccgcaaagccagcattgtcttcttttgggacaggcccgggaaccaagcgcgcataccgtgaaaataaatggagcgaacgagcaccggatttgtcacagatggagctgatgaaaccttctgaatttccaccaaggacgaacataggcgccaccacctcagtcgttggcccatctgtgacaagtcccaaatccccgaaagccgcaaaccagcctgcttctgagaatttggtcagcttgacctgtccactaaaagctggtcaaacaaacggtaaagctacgacacagccacagaagcctgctgttctcgcgccctcatcagtcatggctcctccagagtctcgctcttcgaaattaagccctactgtctctatttcctcctcagctacccaaccaaagccccttctacagaccaacctcacccagccggtcgatcctgtggatcctactgtctctactttctccccgcgaggtgaggctctcttgacaaatcctgggcggtcaacctctgcctttactgcgccgtcatcagctccccgggccccattgcaggacaatatcgactcgcctaccggcccttcggcctcgcctcgcacagtctcccccccggctgttctttctggagcccgtgctaaggctacctcaaagaaacctgctggactctcggattcccccactgttctctcaccagccattccaactagggcccatctcgagaggcctactgagaatcgaggctctcgggatagccgcgagacagtccgaggacatgacacatatagactggagtcagcctacagcacagttagggctgatacctaccgaccgtccgacctctcacgtcagccgtccccgtctcgatggtcaccaccacctcgccggctatctccaccccgacgttcaccaccacctcgtcggccatcgccatcccgatggtcaccaccacctcggcaatcgtcgcccctccgacgatcaccaccctcccgaaggtcgcgctcaccaccttctcgtcggccatcgccatctcgatggtcaccaccacctcgccggctatctccaccccgacgttcaccaccacctcggcggtcgtcgcccctccgacgatcaccaccctcccgaaagtcacgatcaccgtcccccagtcgaccgtcaaggtcctctcgccgtgatatgggtagttcttacatggcggcccaaattgcaagaatgccggttcgtagttgccgggcgcgcggttgcattaacattggtgattactggtgcaacaaagccttgggagaggttcttgtccacatgtttatcggacccgacaagagacccctcggtgctttcagactatgcgacatccgtcaggatgttcggcaatctctgatatcgactaagaacctaaaaacgaaccaagtcgagctttggtttaagcacctatgcacagtcagagagtacgaaagattgtgtgaatccagtgtcagtatcagatccgtagatttgtctcccatataatgctaaaattggccataggagataaattctgtacggagtaccggctgggtcgagggtttcagcgacaccaacgaaaatctctttcatctagcagaggatctgcgaaaggacgacctcatcgccattcactatcctacggagcaaagaaagggacctcaagttgtctggcttgcttggtcacgtggatcacaggaattcaagtttccacatcctgatgatgaagtgccacccggagttcctctactcgttgctgctcgcagtatgctcgcgccaatcatagctctagcggcaagtggacctagccagcctagtgaacgaccgcatagccttttgccagatgcatcgctttcactgcgcgtggagccccctagtacaagtgatggcctagggtctggcagtcccgcaagacggtcgaactttcaccatgatacgagaatgagtgggtccttgcaatcgcgagagacgctggccccagcaccggcccaaacccttctgcccgcaaatcaactcaaagataattcaatttgcactaacccccaaccccaaggtaacctcgcgagtcaagcggctcaagcagcaactcaggcgcttgacgagtacatgaaagcccacaaaatcagtgtggaagaacttgcgacaatcgaggaaggcggaaaactatcgaaggcacatatgttctatctgcactttccccgaggcaatgaggaagtgggaacggacctggagcttctgcaggcacttttgaaatactatgacaagatcattttcacaagcgacagccccgaaggttgggcaaaatttgtgcacagcagcagacagggcgtggccatagtatgtgaccgatgtttacacgtccacaattgtcaaacaactaattaagagcagttccacgaatcattcgccggatacgatacgtttcagcctccactgaattctgtgcttcctaccaactcgttcaatttctggattgttcgcattcaaagaccactggaattagttgatccccgttattgttcacccggtgaccacggcctacgcatctttccatatggcggtgtcatacttctcaccgaagatatgttgacagacctaaagggggtggcggtcactctccaatggattcggaatataaacaagtacaaacgcaggtcttggacgctgatgctaccccccgggatacttgagtggatcgaaaggagactcagtgataagaagtactcgcaagatcatgggctgtatgttgtacccctttaccgctatttggctcaggcttctaacaaacctaaccttagcctgctgctcatccacatgttgatcattaagaacaatgccacggatgctcacaccggcttgtttgataaagctagtctacaccttaactcaaaaagcaacgtcatcgcaccctcccttaatgaatacggtactcgcacagagcaccacgacctcaagattcaggacaaagtcgaacgcgatgcagatcatctcgtcgaattcttcgccggatggtcattgataaacatcccacgcttccgaaacttcatcgctgtcacatctctgggtgcttctaccgggcaacggtgggacaaatggggccatatgactgccatgcgaggtggtttcgcccattttttcaaacgattcaaaatagactcggcaggccttatgggctacctgtcaggtggtaccaagctacagtcttctactagccaaataactaccccggtgaccgcgaccacaccccagacgcctaattgggcatcttacaactccaacgcctctgtccagtctaccttcacaggaagtccgaacggtaagggcacgaacaagtaccctgctccctacaagtgatccttgcgaagttccgaccaaagcaggttacgcgcacatacgcatgttctcctttttgcacaatcttttgcgataccccggtcgatctgttcttgtatgtattatgcataaaaagctatgaggtcatgaaatgaattgaaattagttagtcaccatatgtgagagtccactaggtagcttgcaggaaggcatactagttttgtccaactgcattcaaaattgagactcaatgcttgatcagtcatggaagacctacctaggtatcgtacgaacgttcgcgatcttcaaaaggatagttctgctaacctgcacgctaattgctgccaatataactgggatgagaagaaaacacccggaaagatataactagatagacaccgggaatgagacgaaagatgaaagcgtatcatttatttacacttaaccagtcgctcgattctggtattcctggaagttcaacccattggagccatctgcatcatcttgcgttttactcttttgatcctggtctttcttttccctgcgagtttttgcttcccactggctttcctcggcggaaatcatagcatggaaacgtccgccctgtccacgggcaaggtagatgggctgttccttgcggtcggctacagcctcggtcacgagaacgaatttcacactcgagccgggcgcttcgaacatggcgtcacttagaatggtctccatctcagttcgcagcgcgcgtgcgccggtgcccattgcgaaggcattaccggcgactttgtggagtgccggtgtggtgaagcgcagctcgatacccgagagggagaatagggtcgtgtattgggctagaagggagttgcggggttcggttaggatgcgcataagtaagggttgagagagagcagagagagcggcggtgacaggaatcctgccgatcaactctgggatgaagccgtagctttgcaggtctgagggtgttaacaggtcgagtgcgttgaaataggttggctcggcgccagatccagctggcgaggcagaggagaagaaagggagatgcttcttatacagcgcttcttcctcagaccctgggaggattggaagtggctggttggtagagatattgggtgaaccggggaaatcactagtgtttgacgcgggccgaactggctgaccgaatcctatggatccacgggatattcgatccatgatagctttgtgcagtccgacgaaggcgccagagaacacgaacaaaatgttgtccgtgcgcacattgtacacttctcccttgccagctgggtttgggttgttgggttgaaatgacccattccccaagggactgttggagggatagctattcggggcactagttgcgcgggggttcttctctggcttggcctggacctgcacggttgtgccttcaatgatcttcaggagcgcttgttgtacgccttcaccgccgacatctttgccatgactaaccttcgcggctgcaatcttgtccacctcatcaaggacaattattccacgctccgcctgctccacgttgtagtctgcagcggccaaaagtcggtgaacacacacttcggcgtcctctccaatgtaaccggcttgggtgaacacagtgcagtcggaaatactgaaaggcacagaaagcacccgagcaagggtctttgccataagtgtcttccctacaccagacggaccgagtaacaaaatattggacttttcaagctgtagcggcgacgtatcggcgaaatctgcttgttctaagggggtgtttgggcgggatctgggggtttgaggtacgctggtagtcttctgcacacctgtaatatcatctgttgtaccgaaaaaattaaattagaaagcaagcggcaacatcaaaaatcaataggtgatataccgtctaaatgatgagtctcaagtgcttccctccgctgacgcttcgcaagagcctcggctgcttcttcctcacggcgcaccaactcttgcacgcgctggtagtgattgtacacggcgacactgagcactttcttcgcgcgatcctgaccgacgacgtattgatcgagatattgctttaagaccttcggtgtgatgcggggggcgccaaaggccggtgttgatcctaatggtccggaagtagggactccagtttcatagctaccagtaaatggctgggatgtaaattctgaccggttgaattgagacgacgtcggaaatctggtggaggagctggacagtttgcgtgttgaccagctgtatgattgaggaagccgataccgggcaatgtcacgacaagccaaggcggccggcaggcgacgctgtaaatgccgccacagcattgctcggcgccagtagatcacagaaggtttatgagagacagatagagagcccttgattcacaaagcaaaggaaggacctcgggaggattggagagcaatggatcagataccggatagctcccccgcaggccccggggtgatcttatctgatgagtcatcgggccgatgaaccggctattcacggataaattgcactgcaatataacgatctgtatagtattatagtatgtcggtggtaactagagacaattgagagttataattcggtgctcgaagcttaaaatacgagccatgacaaccctcaaatgcagcgcatctagatccataattctcacagttgtcaaatccctgtttcgatccgttgatggcgacgaaaaattacacttatctcagtaaagcaaatgcgttaggagccagacccacgtctcacaagtcattttgagcggacaacaatccccgtatctacactcctcagcaggtatgggatctgaggagacgtaccattcatctcctgggggtgttgagcagcgaggattggaattatgcaggaatatgtgctttagaaaatgagctggctagaaacatatctttcaatatttgctgttgcaaatccagctctgtttcctagatgaatatcatttttgcgcattgatagcattgtctcaccatagagctctactatgcagacaaaaatacgactgcctaagtagctctgtgtagggagggcaagggcaagggcaagtgtccgttttgggaaggtacgtgtgtgttgttggatttgggaaggtgcgactgttatttggtttaggaaggcacgcgtgttgctggaggtataaaaggacccttcccacctttcttcctcttctcttcttcttccttcttcctctcaaccctctcgaccacaatgtctctccgtagcccccagagacggcgtaggcggagggtgccggcacttggtgctcatatctacggagatctcaacatcattaccattgttgaggtctgccgtatgccggacgatacgcaccctgatcaaaccccagttctcgtgcgagcccttgcataaagtcatggctgagtatttgtgcgcacgaatactccatagcaattggcggtcccacggaatacattctctattcttttttacgggtgaagatacttaaaatagtcttatgagatagataaagctctttcatgacaatgatgggtatttggttatttgttttgatctctaatgtcgaaggttgctcgatggcgtccgtggccccagaaggcgttttatcccctagagatataggaatgtttgaacgtcaagacctgcacagaaccgggtctagatttcacggttcagatcgaatggaagcaagtggttcgatcatgttctgtttgagcgcagtagactcagcgtattcgcctagactcaacttttagaagagctctggatgtactcattccacgtcgttgccggagttcacttgttagacagatatttacggctaacagcaaccgaggcggtggtggcccagtcactgaccgaaggtttttttaatttttgtccaggccaccttatttattcgccttgaacacaggctgctgttccatcgtctgcgagatgaagttacggagggctgaccaccgaccggccgtcgggttcgactcgttgctcgtctcgccattgttggcagccggggctgatgtgatgttggacatctcaaccaggttcttgttgaagcggtctcgctccagtttctctagtttctcccggcgcttcaaggcacctggcttgtgtctcagggtcttctgcttgatgacgttcacttgactggcggcatcgttggattcttcagcctcgggcaaggcatcggctaaagattcgaggttggtgacaagtttttttgacgctcgtcgacgcttaggggtcttctgagaatttttctcgatctttgacacgagggcagcatgcttgatctgacgcttatctctcttgctcgtgcgaaattcgtcaccaaagacactgggtttggctatcgcgcctctgcccggggcaggtttcgtcattgtcttgcggattggggcctgtaaaggtagaacgataattaaccggctgaaagtggaaacaagatatgtaataatgcagcttaccatgctcgcatgtgagatctacagcggggagcaacagaggacgaaattgctacgggaaaagcgaaaccccgtctccaattgttcaccgcctgcatccactctccccactgttttttttcaggaactcaacgctgtttggctcttccacacaattagtccatgtatgtgtcaagggcacaacgaaaagggaaaaaaagataaaggaaaagaccgcgactgacgttatcaagttatcgtgtgctaaattgcctctccgaatttcgacggctttccggtgacatcagacgtgatcagaaggcaatcccgaaaaggctgaaattattggggacccagcacgataacttttatggacatacgtctcaatttacgtcggatctgcgttcctttcacctctatcaccgtatctcgacctcggtcagccaccgggttccaaacccgattcattattccaccccgtttgcccccgccgacttctcctttaccttttaaacccaccttctccggaccactttcccgcagatcaattgtctcttctacacacaccatgggttctgtcgctccttatcagcgcaagcacaaggtcacagtggtgggctccggtaactggtaagaagagatcagtttctaaaaggtggatttgtgctaattgtgtgcttattcaataggggctgcgccatcgctaagatcgttgccgaaaatgcgtccttccaccccgacctcttcgaagagaaggtagagatgtgggtatttgaggaaaatgttgagattccgaagacttctaagaactacgatgcctcaaacccaggacctcgaaaattgactgaggtgattaacaatgtccatgagaatgtcaagtacctcccggggatccagttgccagtcaacctgcacgccaacccatctctcgaggatgcagtgaaggacagcaccatcctcatctttaacctgccccatcagtttatcattaagacttgcgaacaactcaagggcaagatcctcccttacgcccgtggtatctcttgcatcaagggtgtggatgtcaacagtacaggtattcacctcttctctgagaccattggcagaatcctaggcatctattgtggtgccttgtctggtgcaaacatcgccaacgaggtcgctcaagagaagtggtgcgagaccagcatcgcctacgatcccccgcacatggactcccaggtccccactccccagcgttcgccttcttcctccacaaccaacttggtcgagttccagcataaggacacctcgggtcaaatctcggaggtcaagttgcaggccttgccgtcggagtaccctcctgtcgaccatgccgtgctgaagaccctcttccaccgcccttacttccacgtgcgtgttgtgagcgatgttgccggtgtgtctatcagtggcgctcttaagaacatcgttgctctggccgctggctacgttgtcggcctgggatggggtgataacgccaaggcggctatcatgcgtgtgggtttgatggagatggtcaagttcggagacgcgttcttcagcgccacgattgacacccgcacctttaccgatgagagtgccggtgtggcagacttgatcaccagctccagcagtggccgtaacttccggtgtgccaagttgagcgttgagcgcaaccagcctatcgaggagatcgagaagactgagctcaacggccagaagttgcagggtaccctgactgctatggaagtcaacagcttcctgaagaaccagggcatggaggctgagttccctctgttcactgctgttttccgtgagatttaaccccttctatatgtgattgctggatccaagctaacgttgcacaggtattttggagggaaccatgaaggtcgaggatattccttcttacattgagcggtaaaaaattgtcctaatgtcctttgcttctatgtttgtgttacttatcaaaacttttgtttcccttacagccctcctcaggcccgagccccgacttctgcaccacaagattctaacgaggataatggcgctcggttcagtgctgcacgattataaatagggctaggattgatctttggaaattgcgtgtatagactttcatggcctgtatttatgaacggcagattatattctagacatttggttgaatctaagactgttcaagtgcagacaagaaacaacatgcatgtggacgtgtgttgacaaaagataccaaggaaaatgcatgatgtcattccccgcgcggtctgggctctctccaggaacatctgaggggaacgccgggtcctctgtgcccgacttttccttccttgctttttcagttctcttttatttccccttcttatatattcgctgaagtctcacctctctgttctcttcactatcgcagtgaaagtagggtgaatcgttccagattctcctgtactctcacgacctgttagtttagatccgcattcatccaatcgttatcgacccgtcgcaatggcctccccacctcaggtctacttgctaccactgaaggatgacggttctccagatgtgcccggcgggtacatctacctggcacctccaccgaaatctggatacgtgcttcgattcatcatcgagggaacgagttccatttgccgacaaggcagtctctgggttaatattcccgaggagggaaagtcctttgaacgttggtcattccgggagttcaggtagatcttcccagttcttatatgttgtatagattgagagtcgcggttgctgaacggaagtagactgcagcccaacttcaatgagaacattcagatcgatatccccgtgacatccgcgggagcgtttgctttctacacaacattttctccgctaccggagttctcagtcgaggaggtgtctgctccggagccgacccggacgcctattcactacatcgatgtgtcgcccaaacttacccttcaagggaaagacctaccgctcaatgcactctccatcttctcagtgatctcgaagttcatgggtcaaaacccggcggactgggacagacaccttcgtggaattggtcagcggaactataacatggttcatttcacacccctcatgcagcgtggctcgtccaactcgccctatagtatttttgatcaattggcattcgacagcgcctttttccctaatggagaagatgatgtctcttctttagttgcgaagatggagaaagattatggtcttctcacattgactgatgtggtctggaaccacacagctaataatagcaagtggctggaggagcatcccgagtctggatacagcgtggagaccgcgccatggcttgaggcagccctcgagctggactcagcgcttttgaaattcggtgataacctccagggcatcggtcttccaactgagttcaagacagaggaagatctagtgacagtcatgaacgcggcgcgcaaggaagccattgatggaattcgtctatgggaattttacgttctcgacgtcaagagcgactttaagaagattttgaacgaatggatcaatgtaaccgtcgatcctgcgctcgtcgaacgggacgaaatgcagcagttcaaaaactggtcgctcatgcaacaagccaacgttctccgcgagattggtattccatccgtcaagcaggttctcggacgttttgaccgcgctgtcgatccgaagtttggagcagttgctttgaatattctatttggggattacaatgagggacagaccgacctcgctgaggttgaagagtacttgtcccagctcctcgacgaggccaacttgccattctacaaggagtatgatgcagacgttgatgttattatggaccaactgttcaatcgcatcaagtatctcagaattgaggatcatggtcccaagatgggtcctgtcaccaaggaaaatccattgattgagacttactttacccgccttcccctcaatgatgtcacgaggaaacacgaccccaaagccctagccttggtcaataatggttggatctggaatgccgacgccatgaaagataatgccgggcctgattccagggcctacctacgccgcgaagtcattgtctggggcgattgcgttaagcttcgatacggctcctctcccgcagatagtcctttcctctgggactttatgacgcggtatacccgccttatggccaagtacttcgttggcttccgaatcgataattgccattcgacgccgctggtggttgcagaatatttgctggacgaagctcgcaaagtccggcctgatttgaccgtgtttgcggaactgttcacgggctcagaggaggccgactatgtcttcgtcaaacgcttgggcattaatgctctgattcgcgaggctatgcaggcttggagcacggaagagctgagtcgccttgttcaccgtcatggtggtcagccgatcggtagctttgagatggatttaccttctgctggcagtagtcatgccattgcgtcagctaggtctggcaagactaatgaaagcatcactcatattcgaccctgtccagtgccggccttgttcatggactgtacccatgacaatgagctacctgctcagaagcgcgacgccagggacactcttccaaatgctgcccttgtggcgatgtgcgcctctgcaactggaagtgtgatgggctacgacgaggtatatcccaaactcatcgatcttgtccatgagactcggcaatacgtctctccctcctctgattctgagagtcttgtcgtcgggtctggagacggtgggattggtggtatcaagaagcttctaaatgaactccacactatgatgggtgttgaaggctatgacgaaactcacatccatcacgatggtgaatttatcactgtccacagagtccaccctaagaccagaaaaggcatcttcctgatcgcacataccgcgttccctggccatgaaagtggcgcgattctcgctcccactcatatcgccggtaccagtgccaaacatatcggatcgtggcaacttgaagttgatgctagtggtgaagcaaaggaaaatatcctagccgatgacaagtacttgaagggtcttcccagccatacccgcgacatagaaggcaccgagattgagcaaaacgccaaagacgtcaaaatctccgcactggagtcccttgtcccggggtctattgctctttttgagacatggattcctggcgcagatcataccgatggatttgaaaacaacctcgccaatggcgcggatgacgcattctctgagctcagcttggttgatctgaactttgtgctataccggtgcgaagctgaagagagagactatagcgacggtcaggatggtatttacagcattccaaagcaagatcctatggtctatgctggtcttcagggctggtggagtgtccttgaggatatcatcaagtataaccaacttggtcacccgctctgcgatcacttgagagaaggtcagtgggctttggattacattattggtcgcatggataaggcagcttccaaagaaggatacgttgccttgaaaaagcctgctgcatggcttcgaggaaagttcgacgctgtccgcgacttgcccaacttccttttcccaaggtatttcgcgatcatcgtgcaggtttcatacaatgctgcgtggaagagaggtatccatctccttggtgacaatgtgcggcacggccaggaattcattcatcaactggctatggtcagcgttcaacaaactggctatgtgaaatccgcatccttgtggcccaccaagatggtccccagtctcgcagccggcctgcctcattttgcagtagactggacaagatgctggggaagagatatttttatctccattcgtggcttattcctttgcactcaacgctttgatgacgctaaggagcatattatcgcttttgcaagtgtgctcaagcatggcatggtccccaatctgctgagcagcggaaaattgccgagatacaattctcgggactccgtctggttcttcatgcaagctatccaggattacactgaaatggcgccaagcggcattgatatcttgcaagaaaaagtcccaagacgcttcttaccttatgacgacacttggttccccttcgatgattctcgggcatactctcagaccccgactcttctcgagtgcgtccaggaggtgttccaaagacacgcttctggtatgtctttcagggaatacaatgctggtcccgagcttgactgccagatgaagcctgaaggcttccagatcgacgttaaggttgactggggaacgggtctaattttcggtggcaaccagaataactgtggcacttggcaagacaagatgggagaaagcactaaggctgggaataagggtttccccgggactccccgtgatggtgctgctatcgagattaccggtctcgcctacagcgctctagcatgggttgcacgtctccacgaatccaagacctatccccatgagggcgtcgatattggcgatggcaagaaaattacttttgccgaatgggcccgcaaaatcaaggacaacttcgagaggtgctactttgtcccccttgatcccagcgaagatagtcagtacgacgtggacgcgaaagtcgtcaaccgccgaggaatctacaaggatttgtataagtctggcaagccctacgaagactaccagctccgcgccaacttccccattgcaatgtcggtcgctccggagttattcacgcctgcaaaggctctcgtggctctgtcaattgccgactccgcaattgtgggccctgtgggcatggcgacactggacccatctgacctcaactaccgtccttactacgttaactccgatgactccgatgactttgcgactgccaagggtcgcaattaccatcagggtccagagtgggtctggcaacgcggctatttccttcgtgctctattgcatttcgatctcctgcgccgaaagacgcctgaggaacggactgaatgcttccagcaaatcacccaacgacttgatggttgcaagaaggcattgcgagagagcccgtggaaagggctaacagaattgacgaacaaggctggggagcattgtaatgattcggtgagctacttccgtcctgatatatttctcattttgtacagtgctaatcaaacatatagtcacccacccaatcctggtccgccggatgtctgctcgacctttactatgacgcatcgaagcatacctagatttatttgcttttcatttttggatacacgatcaattggatattcacctaaacacatattagatatcatgcattgttacggaataagggtagatggggcaaagatgatccattggggattatcctacggacgtccactaagatatgtcctatacttacctaggtagtcatatatacacgggcctcttctggtatggcgcccttcctcgggccccgcttgagggttagtgccggccctggcccgcttttaccacttgaccccactgtcatccatctataaaacaccgcttgccctctcctcctcttattcatacactttcccttctctttccctccttctgctccctttctttcttgcacccccactgttgcctaagcattggccttcagcctgatgagcatgctgatttactcctatactgtgagtctgatacagtctatcctcagtaaaaaatagtgtagtgcgttagttattatgtgcctagtaggtaactaggcaagggtagatctcttttatctatactacggtggttctgtcaggaatagataaagaaaggagaaaaggggcccgattaaaactcgcactcactcaactggaacctagctacaacatatattgtacagactgacaacgatttcatggcacgtgatctgggacctgactaatcctaaaacggcaactgatcagatcggcactcttcacgataacccaatttccttatctcaccccatgaatgccaaactttaagattcttctcatttcgagttcatcgattttcggtggttgaaagatggcactaccgctacaggaactgatttctccgcctcaggaagataacccaacagcgcaggagacatcactaccgcatgacgagatatcactacctcaccgggaagaaacatcactaagcaaagaagaggcatcgccacccgaggaagagacattgtcgagacagcatcgtgcgcccatccatgcgcccatcgtgcgcgtagctgcgaaagctctggtcgagaagaatatccccatcgtggagtatggggagcagatccagtggcgctacggagaccctgtggtccttctggtaagcatcaaagcttttgtggtattgactagtcgactcgttgggaatttctaaacgccttgaattctagcgcgtggagtgggcagtccccgatgaactgctctcgcttgcgtcagaaattctatcaggccagggtttcccttctgtgcccctacccacaggagttgcttacaacggagaatggtatcgaggttgcattatccacaggctgggcgagaggtgtccggtatatctctacccgctgtcatttgtaggccttgagcttcaggacacctgcgaagtcacatccacctttgaccatacgctcaagatcttgacgcccaaacctagcaaatacatggtttcgttgctccgtcatctcctcaaccacccgcttgacgaaagtttcacacttcgagtgaaagatgatctactgtcttttatgtgcttttacattttacgtgaaaagccgctgaatacgaaggatggggaatgcgacgacgatgagaacgaagaagactaccaaaacagagtcggagaagcagtgagagaaatggaaacttgggattggggccccggtgaaaaggactatctgaggatttctgaatctatactccgagactgtcggactatggatcagttaactagttgctgatgagaaaagaccatctccgcatgcctgaatctgttctccgagactgtcgatctattggccggctctgagcacccaagtacgtgttgaaagaacatcaataaacgtagtaagttaatggaatattggtacgtttattgaccaggtgttgaatccgtcatggctagagctaggtccattgcatgatatccccatcaaagggaaacctcccacgattcccagaagcttattgcaatttccactctattatcacctccgctctcctctctgttacccccctaactccttcgctcctccagcatttgacgaaataactcagcatacggagagaaggataggaggatgcagagacgagaagaactggatccacgcgaatgcctatcataccaaggcaacaaggcgacaccggtgactcgtcacaccagctttctaattgctgatgagcgccaaatcctccgcgctcaaggtggccacaagcaaagggcgaatttttgtatgcatctggtatagcttgcgaacaaaagcgagtaactcgtgcttgggctgctccagatatccctcgaaatcgataagacttccatcgttgaccagccaggtcaggattaccttaatatcgtcgacgtccctcactgcttttctcttacttgcgagacgggtggagttggcgataaatgcccatctcttgagcttggtgaggacgaggacggagggtgcaatgatggggacttgagcgccatgattgattagcgaaagcttgctctagtagaatacacaggtactcacttggggtctcctcaacacgtcccggcaggacattggcagtgacggagcgaagagaaaccgaatttgcgtcaggtaacttcaactgtctgccttctcctccacgaagaagctcaactgggatgggtttatcatcccctcccgaaaacacaagtttgctgctgggggtcacagtgaagcaggcgttggcctggagaagcttattgcgggcctcgcttgggtccgaatccacgattacatcaatgtcctgagtcagattagctcataaatcatgttgagacgatacaggaaatatgaacctcagttattctcgatccgccaatgagagacgtcgcatatccgcccatgaacccatggcgaatgttggcgcgagtgagagcgactgttgtttccttggcagctgcatcgaggaagcggaaaggttcatcttcctggactggatccatagctcgagcaagtcaactgagagaaaattgagagaaaattgagagaaaattgagagaaaattgagagaaaattgagagaagagaagcgtcgaagagtgtttcttgtcatcgagcagaagaaaagagcatgaaagagagaggggatacaaagataggcagagtaaacaaccttggaagtaaccacggtatattcggggaagttactacccagggacgataacagatggaaggtacgcctacatggaaggaagattgactcagttgatgagacttgttggctgcgtgcatactacaagctctcgtcggatgaccgttggtctgccatgggggattttattgaatcaaattcatgtgataccccagctatctgcaatggtgcatttttcctacaattttggtgccctggtttatagaattcaactaggtcttggagatattgaacatctcgaaaaaaatgcccaatgtcttttacatggcgtactcatcgctgactgccacaacgtccttaggctcttcgatgtgcctataacaattagacatagacagagagcttcgaatccaacagaaattattgaaggctatccttgtaaagaggagaaagtaagtcagactgtaagagtacttcgtcattggtgaacctactcaatacaaaccatctagtttagcactataagaaatattctaaatagatcgtcgttaaaggttctcttctaaaacattcattggttcttatttaagcatcctcattcaaacgcttgtgcttatttatacgcatttgtcgttttccaatctttttttaagcgtctctcttatagttatgatgtacttagttaactacctaactaactagttagttaactagttaactaactagttaactaggtagttagatgaagccttagggttatgcgcataaatgatgactcagctacatgcaaccggcaccggaagccgtcattgaaggtttggtgaacaggagacaacaaaggggaaactcaccgattgttcacgatcacttctcgaaaaccataccaaagtacttgaacaactgttgcaacccagaaagcaatcgaatcatctccaacagttgaccatcccatctccctgacgtcagccatttcagcgatcaacggaatcctcccgcatgcccttgacgaactactagctccgacagcccctcgctcgtcgaagtgaccacagaaacccgaagtgcagaggctccctataaaccagattcatgtctctcacggcatcagcggcctccgctgcgctgacgttacttgccgacgggcctgatgacggaagcaagaggccgtggcgtcccaacgatccggtgaaggaacagcgcgatctgtacacgcagtttgtgattagcaccgcgttgggtctcagtgcctttttggcgttctgtgtacgtgttctgttgctatggtgtgtaggttttgatcgctgactgcttctagatcttacgaccaaaatggaccgagttgtatgccgcgcgacgacgacaaagaaatgctgcttcgcggttacctgagcttccagataccctttttggttggatacccgttctccatcagattacagaagaagaagtgctgcagtctgcgggcctagatgcctatgtcgtatgttcgaatgctttggcttctctaccagaccatgcatggacacttgctaacttgcatctctgggtagttcttgtctttcttcaagtttgcgatccgattcctcttggctgtctttatcttcgctgttgccataattctccctatgcactacaaatacaccggccagtatggagttcctggttgggacaacccccctggcaataagaccacgagtccaattgatggaagcgaaaaggaaaagccggttacggaccctgcatatctgtggatttatgttttgttcgcatatgttttcagtggcttggccatctacatgcttcttgacgagacgaaagtaatcatccgcactcggcaaacctatctcgggaatcagaccagcactactgatcgcaccattcgcttgtccggtatcccgcacgacttgggaaccgaagacaagatcaaagaatttgtggaaggcctgcgagtcggcaaagttgagagcatcacagtgtgccggaagtggcgcgagctggacgaattgatcgacgaaagaatgaaagtcatccgtgaacttgagagagcatggacgaaacatataggatacaagcgaccaaagaacgatggaaatgcattgccgctgaccgagcaacaaccccgcgatgcggacgatgagcgatccgggctcttgtccggacatgataacgagcatgtctcgggttattcgaatgaaagacccaaagttcgcatctggtatggtctattcaagcttcgtttccggatgatcgatgcaatcgattactatgaggaaaaactacggaagatcgatgaatatatccaaaacgcccgagagaaagaatatcgtactaccgagattgctttcgtcacgatggagtcaatcgccgcatcccaaatgcttgtgcaagcgatccttgatccacacccgatgcaaatgttcgctcgacttgcgccggcgccggcagatgttatttggaaaaatacttacttgtctcgtactcgacgaatggttcagtcatggtccatcaccttcgtcattgggttcctgaccgtgttttggtctgttctcttggtccctatcgcctcattgctggagctgaagacccttgagacgattgtcccccggctggcagagttcctccaggaacatccgatcatcaagtcgttggttcaaacgggattgcctaccctcgcattctcgctgttgacggtggccgtgccttatctttacgagtgtaagttttccatcgaataatcccccctcatgtagttgttcaaatcgctgattatctttgcagggctgtcaaacaaccaaggaatggtctcacgtggtgatgtcgagctgtccgttatctccaagaatttcttcttctcgttcttcaatttgttccttctgttcactgtgtttggaacagcgagtggtttctatgggttctgggaaagtcttcgggatgcattcaaagattctacaactattgccctcgcattggccaattccctcgaaggcctcgctccattctacatcaacctgttgattcttcaggggttaggccttttccccttccgactcctcgaattcggaagtgtcgcactataccccttccaattcctgtcggcacgcacgccacgggaatatgcggagctgtcaactcctcccaagttcagctacggtttctccatcccgcaaaccatcttgatattggtgatctgcgtggtttacagtgtgttcccgagctcgtggctgatctgcctgttcggcctgatctacttcacagtcggcaaatttatctacaaataccaactgctgtatgccatggatcaccagcaacattccactggccgcgcgtggccgatgatttgcaatcgcgtattcgtggggctattggtccatcagctggccatgattggcgttctggctctgcgccgagccatcacccggtcactactcctggtgccacttctaggcttcaccgtttggttttcatactggttcgggcgtacatacgagcccttgatgaaatttattgctctcaagagtatcaatcgggaccagccgggtggtggcgacatctccccctcgccttcgtcgaccctctcaccgccatcaggcctggatcgcgatagccttccgatccgtattggcggacaggacctcgaattgcggctaaagaagtatgtcaacccgagcttgattgtcccgctgcatgctgcctggcttcctggtcgcaacccggctcgaggcaatggaaatggcgcgtccgcgttcgaggttcatcagacacagaatgtttgatttcccgggttgtgtggattccaggtgtgcatgatccgatctatccttgtgttgtttgttaatacactcttttttccctgcatatgtttttgacccgtcatgttttacgatcttgatacctcgttcgcatttcactatcctgttctggtatattttcatggttatgatatccttgcgtgacatgttcgctttccttctgtccggctcgtctcgcctgtccctcgctattcccctcccacgcagtatttgaatttgttatttgattttccaatcctcttgtttgtatgtttcattgttcatgtcagagtcgaatatagagtctgtacagtactgttgctctctggatttcgtgctttctaataatgtgggttatttacccgtcaggcgtgagcggctgccttttcggacacacaatgcaggctccactgaggcacatctcctcggattcctcggtaaagatatcgggttcgcttaggtctactcttttcttgcattcctcagttccaaaataagcccgcgggaaacgtggcagtgtctgagcacaaagtcaatcaaaagtctaaccgaagaaagagcgagaaagctgagccctcgtgtttcctctctggccaatgcaacccgtatttagatgtatgtgattagtgcaattatcccaagaaaaaagggtgtctaaagatttgacttcaatggtgtggtctgagacatcattctgctagggatcacatcaccattgtgagctatagttagacataatgaaaacaatacaatatcacccttctttgcatccgaaggttgaatcggcaaatcgattcgatcattcgatctaacctccatcgcggacatacctcgaatacttacggaatcgccgtcttctggaatcccttgggtccacatggtcgggggcacattcctgagcagtggggggtggcacagttgtctctcttgcggtgaggagatgaaacagtaagaaaagaacagagacaaaacaaactatccttgggcattaaggaatgtgggatatgctgaactaaatactaatccaatgatcttactattgtgtttattgttatgatcatcatcatacgattagagacacatgcatgtaagcggtgaggcgtcgactaagtgccaagccatgcgctgcatccggggcgcattccttaattcctttcccgagatcctgtggaatgtcagtgttgcagattgatagtggattctcttttgaacgaggattctttttcctgggttgtaacggggtgtcgatgctccagggctgctacggtgtcttagtacaacatggatctatttgaattgaaccatggaaatggaacagacttggatgcataaagttaagcttggtagttaggcccatggatcactaaaccctaaaccaccgttgcctccaaatgtccagagatgtccattccatagtggaatgacagtagctgcattgactgcattgatgcattgactgcattgactgcatgactgcatcatacaaccactagtactaaccacctacctaaaaaggtacattcgtttcttacatgtcgcttgacgtgctccactttttcgtcggatttccatgaggcacatcttgccctagactcgtttactgtgtaagtgtcgacgtcagaacggtaaattgtaattgaaaattaactagatggcaaacttagttaactttgttttatctggaaatggtgaggtgcagtatttaattaaacaagtcagcccttgcctcgccctcgaatctgttaggtttcattttatcatatcaattccccgtcgctgcaccgctttcagacgggaggccgatacaaccttgcacttggcacgttctccattcaacttagtatcaaaggtcgtgtgtaaacttttcttaaatgtgagtgagctaccttctcgaattaaattactcgcagttgggtttgaggaattgcagatcagggggcttactactgctctagacgatttatctgggggtgaacacttgtgttgtataaatttggtggagatatcttttccatccggtctttgcgtcactcaattgcaagctttgcatcttgcttggtgtattttcgactgaaggcacttctgctctggacaccaattaattaattgccgtcaaattcacattcaatcccgacatttgatttccaagcaattttctgggattgaacaaagagactgagcgccactggtgaatactaagtcgctctctttggtggatgggtatatcaacatgcctgagctgcggtcttcgagtcaagactatgcccgtcaaatatcaacgaatgcctcaacgcacaccaagcaaagatcaacgaggtcaatcccctcaattttgaagaaatatgagacacgatatatgtcacacaatcgacatctttcaaaatgcaattcaacgagcagctcatccccttccgctgcaaatgttgcaccagcagagattctactggagattttttccatgctgacaccgcgcgacttcgacaacgcccggcggacatgctcacagtggatgcgggttagcttaaattacaagctacttgagaatatgttgaaaagagcagggtggtgggatgcatggctacaagaccgccaaacggcactcatcccccggttagatgagagcgaggtctggagaatgagccgtcgctttgcgacagaatgtctcctttcggggcgaaagttgaatatcgagaagcccgactttttgactaccgctgtggtagacttttcaagtctgtctggttctacgagaagaaaatcccgcgctcaacttcaaccggctttgcagatggccgaagggaaagggtcgggggtgtcaactttcagcatcagcagctgcagcaactacctgctcgtgacgataggctgcatgatctatgtttatactcttctgggtcgaaagtctaggccaacatcaacagacttcggcaatgatgacttggcgctagtctcgcgcatctcgtgtccattcgatgttctctcagcagccattgataccagcaagccccaatttaccgtcgctgcattgctttgcaaccgcgtgggcatggtctgcaacatggatatggcttgggccaaagagtcagctaccaagggatctcattctaatagcagagccacctcgtcccgccacttcttctacaacatctgcacggtggacaacccaccccggacagttgctctatgtcccggcaggccgatagtcgcctttggctgtgccgcgggcatcgaaatccacagcgtgaacgaaacaaaacgcaatgaacaacgcaaacacttcaccctcccccaaccctcagaaatccttcatttcctcccaagtagtccagagacacccaacgagctacgtctcatttcctcgctatctggaccaggcttgtacgaatgcaaatgccccgcttcgccctccccttcatcttcatccttctcaacatcaccaaaactcgacccaaaaagcaaccattttcatttcctcgccgatatccagaccttcaacaaccgccgcattccccataccccatcccgcagcttcgtccgcgcaacacactgccaccactatcgcgccgtccccattaatgacggcttccacatcatgttcatcgagccacgcacaagcctactatgtataggcaccgactccccaatcggcgggccaacaagcctaacccgcgcattcgtctgtattccgcctttctcaagcatccaagaccgacagaccaagacaccacccccatccccatccccctcaaacacaacaccgccaccagcagatctgccagtcccaacaaccttcaccgcgggctccgacctccgctggggtctccgcgtcgtcgccgcctatggcgaccgcctcgtgctgtactccattcccttggacgtattcaacgtgatccgcaaagagcgtgagcgtcaatccgacggggtgatgggtaccagcgacctcgcactcgactggtacgttgactcggagcggccccgaaagcgtggtgagagtctggtgcagaaccagaatggggattgggagttccttttgtctgtctcctaccggcccacggctatgatgtggccatttaagatctatggaaaggatattgggtctgttaaggggactgtcgagcttgctttgcagtcttccgagggtggtgttagggtttgggctttcgggaaggatggcaaaggcacggttttggatattgatactggtgatgttcctactcggtctcttggtgttggttctgatgggggagtggaggatcttggtatcgtccagaggactggcttgggcggattgcagggctcgaggaagcggaagttcgaggaggtgaaggctgggttcgcgggtcgatatggtgctggtcgctattcggaagatgtcaagccttgtgctgctggtgttcatgggatacatcaggagccgtctgttcggcgttcgtcctttgcagcttgcattatagattttaagattcccttgtattaatatacatatctactgaatatatcaggtatcaggtatcgaggtgtccgttttcgcaaatttgctcttccttcctctttcgtcctgacttgtctcttcctcttcctcttcctcttcctcttcctcttcctcttcctcttcctcttcctcttctcttctcttctcttttccttgtcttccatcaccatccatctctcttcttgcatctcttacctctcttttccatccatctgtctcttccatcttcccttgcacctttcactgtcgcttcacctttcagggttctaaatagttccctggcccattttacgtggtggaccagtaagttgacattcacgaattatgttttgaatcaatcagtctcaatctttatctggttttactcgtatagacgtgacagccgttcacgatgggctcaactccactcgcccgtctcccttgcgactgctgggtacagatactaggatatctaccaaaacaggatttgaataacctgtcacgagtttcccacgacatccgtgactcaactgagctcttcctgtatcgaagcattcactgggactggacgaaacccccgacccccaaaataatggccctcttgcagactatctccaagcgaccagagttggctgactacatctggcatgtcagctttgtatgctgggacccggaatccgagcaaagagaggattacctccccagaggaggggtggctggctgggctaagttgatgatgcattttcagctcgctctcgaatggtcacggaaggtggttcgagacgcgaaatgcccgtcagagctcattaccagatggcacggagcactgtatgatggagagccgcacgcctacgccgcggtgctgatctcgcaactgcacaaccttcgcagccttcgactgaacttttcgttcgtgcttgagggtggcttcgtcggggaaatgttgcatcattctctcttcggggacgcaccccctggcgcacttagccggttttcgaaattggaaatggccgactatgcaagcaacttgccttcctcggacttccaccgcaatcggagatccgtcgaggcctgtcaattcgtcccctggttccaccttccttccttgcacactctcgagatatggctccataatgcggatgaactcgttgcttccgctccgcagacgtcgccaagacacttgaatttgccaaacttacgcagacttgttattgccaagacacgtgcaaggccccagtacatcgctacaatactgtctcaactgccatatctggagtccttgcatgtgggcttggcctacaattgccgggcaacagccgactttctctggaatcttgagcggctccttcctgccatacaaaatcgaggacaatcgatcaagcatctctctctcagcgtggagattctcccatgttgtcgcgcaagcggccttctgaatccgccgcatgaaggtgggaagcgttttcgtggctttttgaataagtttcccaaactgaaatcggcctctttaccgcttcaatttctcctcggttggggtagtcgccccctcaaacttcgggacgtgctgccaccaactcttgaagcccttcatataagctccgacctctgtctagagtcagattggatgttattcgaatatgaatcactcatggcattggagttattaatgagacacaaagaaagaggctctcacccttctctccaaactttctcctaccatggagtgcatgtgcccgatgctgagcgcggtgctctggtcaccgatgagggattttacttccgctacctggttaagcgggaagcgttgaatctattctgttgccggcaagggtacagtctatttcctcgttattctgactgcgcaaatggtttcatggcgaagagcgtgacattgataaacgatgtaacttactgtctcccttggccgttcgtagcggtcgacgagctccccgcaagcatgcctcgatattctatcttcaaaccggctagaccatcgaatgcggcctctgctaatttgaacccaactgatgcaaacccaactgatgccaacccaactgatgcaaatccaactgaggccaactgaactgatgccaacttgacaatccaacccgacgcatatccaacctgacggtcaacgtgtatgaatagctaatactttcggaaaaggaaaatggaaatgaagaaaaaaaaattacatagcgaatatgatttgtctcctttttttaggtcccttccatctaagatatataagcattttagcccaggtgcagggcccgaggtcggcttcaacgagatagccgtggaccctgatgacggcatagggctaactttccaaggttggccccatatccaccaaataactatacaaagtaagaatatttcgctatgctggtagaagctgtaatgggaaaactaccatggaatgttgagtttcaaggccgaaagaagtaatatcattgaactttttatccactttgacacgcttaagaaatgccccgtcataattaacttgattatctcaacacagcttatttcgtttccgatttctcgcgacgagcgcgaacaccttgagccagagtctccagtactgactcggtatcctcccagttgatgcaagcatccgtgatactgacaccgtacttgagaccggccttgccctccgcggggaccttctggttgcctaacacaagtcagtacaaacggctctctatagacatcaaaatctgcaaaagactcaccctcgttgatgttactctcaatcataacacccataatagcatcctcaccggcagcgagctgctcagcaagcacagcagcgaccttaggctggttcttgtggtttttctccgagttaccgtggctgcagtcaaccataagacggggacgcatgcccttagcagagagcttggacttagcatccgcgatgctggcagcatcgtagttggggcccttcttgccaccgcgaagaataacgaagcaatcagggttaccgacggttccgacaatggagacaacaccgggcttagtgacggacaggaagtggtgggggtgcttgacggagccaatagcatcaacagcgacatcgagcgagccgtcggtgccgttcttgaatccgacggggaaagacagaccggaggaaagctcacggtggacctgggactcggtggtgcgtgcaccgacagcaccgaccgacagacagtcggccaagaactggggggagattgtgtcgagcatctcgctggcgatgggcatgcccttgttggtcaggtcgacgaagagctggcgcgacacgcggagacccttgttgatctggaagctgttgtcgatgtcgggatcgttgatcagacctttccagccgacggttgtgcgtggcttctcgaggtacgagcgcatcacgattagcagctcgtcggcgtacttctccttcatcttcagtaggcgatcgcagtattcaagggccatttctgggtcgtggatggagcatggtccgatcactaccatcagacgctggcgctgggtatctgtgccatggacaacctcgacggcttctttacgtccttggagtacagtctgtcgtgacttctcggtcaatgcgatctcatgttggaggagattgggaggggtgagagggttgtagccgagaactaaagctgttagagaccaattacgagtaaaatactgccagacttactgcgagaatcttccaaatgatcgtggttgcccacattagggttatcaatgaagaactgtggaattggcgacgtcagcaatgtgaaatttacgatcaatgaggggcttgactcaccgacatcggaggcagaggagggggggagaagatggagagggcaggtttcaggagggcgattgggagaaatggagagtaattgcagtgaacagaaggatatcgagttctttaaaaataagaaaaataagaaaataaaaagaaacggctcgtgaatgagtcaaaagctcagagtataagaatttccacgtgatcctcggtgaatctcgcccggcgctggagttccaatcacggcgagcgcattataaaaatttgtggaaaaatgtggacattaatatgttaatatgttatattaatattgatacgagaagcccccttgcatgcaatactgctgagcctgctgtcacccttgaaataatatgttgtacatgtaacctgtgacttcaccctctagcctccgcatccttcagattggcccttgttgcacccgacggtcgagctcctgcagtccacgaaccaggtcttgacatatatctgcatgttgttccttgacagattgcatttgctgccggtatagctgcattcgtgcttcttgcgcctggaacaggtcatcaaggatccgactacacccctctcggtagatctccaggactcgactgacagtggccttttctgctgccagctgagtggacaaatgctaattcccagttaacatggttacatgtacacagacggttttgactaaccgaattagtttgttgaagcaggttgtgtgcgtccttctgcgccacttgcaaagttgatatccattccatatcgtcatgaccgcccatcgtagaggttcggtgcgatttagcagctggctgtgttgacaccgatatatctgtgcggaaagattggtcaagatactcgtgactcttcgaaggagcaccacctaatgctctctcgtcgatcgttctctgtgaggaacttgcttcaatcgtcgatgctttctccgacttggccgcctcagcagtatccttttgagaaaatgatgggcggtgcttcttgggcggcggccatgggtgagatctcgccagtttttccgtttggattccatattccaggaacatgtctctcttgaacttggtccacatgagtctgtcatatctactctcggtggagatactgcacgactttcgatcgtattcacttggactggcgtcagagtcactggttgtctcttcgtggctcttttcgtcatccaggtcaaactgaggtgcaaccatactcttggctgactggggtatgagtcggggactaccgttgctgtcgacaatgctggtctttgggactgattttgggagctggggggaagcggaatccagttccattagggattctttggtgagaagaggcttttgagactccggagtatggctcccacgtccctcaatccgtcctgctatgagctcatcgaactttcccacatttgaagtctccaacgagctatccgcctggctttcgcacatgttagtgccgtgtgaagaagtggtcggtgcagatcttatgggttgcaaggtggcaaatccggggatatgttccattcccatatggtaatcaaggattgaagggccatcacctagcaagcctctgccggtttcgaagtctgaagagctcgctgtagacatcctgtcatcgcccagaagcctccagaagcctgcgtcatctgcctcttctatctcctcctccttgggcggaagtttcttggcaatcaatgctggattaacagtctcaggctcattttggttttggtgtatctcaactggaattgttccgtctagtacgctttcgatcttcggaggttccagcactgtgtcggtcggcattttctggaactgcttttggggagattcctcgtattgtactggatcagatgagatgacgagaggtgcagctcggttattgactggttcattttgagaaggctctgctccgtggagtgcaagaaccagcttgttaccaacactctctgctctaccacgacgtttgcgatgactcttctcatgaactgtcttcgtctgactggtttgtttctccgaaagtgctcttgactcccggatggtgacctttgaagtagttgtgtgagacgttcctttgggatcgatgtcagaacttgaggatacaccgggcatcatatgaacagttttgtctttacttgtttgtctattggactgtgcccgatgctctaggatgctgacttttgaagcacgggacggtcgttggccataatcttcgaaatccgaggatgaaccggtagtcaccgatgtgcaacttcttatctcgacgatgacaccccccgcgctggtatttccacgcttgttgtggtcctctgtcaatggcaaaggttggtgcggagcttcgggcgcattctcattgggcttcgtggcatggtctttgttttgcccgtccaagggaaccgtgtcaggaggctcactattacccagaggggctgcaggatgcaaattgcctgcagtaagcgttaccaatggcaattgtggccctctggtgctaccctctttggtagcagtgctcttcttcgtgtttgacttcctgcgtttggccggggctgtttgtggctttgacggtattgttcgcttgcttcctgtgtttttggcaactgtcttcggtcggttcgggtctgtatcgactacggaggtgcccccacgggttcctttattctcagctatctcattgggtgtaggacgaagatcttcatcccagtccacttcttgaggattggatttgggcggtcttggttttgtgagcttcagtcgaacaagcttcgactctgaaggctgggatggaggggctttgggttgttggcgacttgggcctgtgagaccgtgtcccgaactcgctgcgtctttgatcgtcgccttactcccggtgtctggattaattggtgcaggtgagacccgagctgccttcatggctgctaccgtcgtacacttgaaatcagaacatgaagagggacgtaaaggaaaaaaggagcaaagggagctctccggagcttcccagctaatgagggtgctgaactaagcccagctccagcgggcatacggcatggatcacatgatacctcaactataacttcgaatgtcctactattatccatatacacataatgaagagagtatagatcagggatgatcaatggttgatttacagatatgaccaagataggtatcagtatagttaatttttattgatccttttacaggtaggtgactgtggacgagtatacatattcaaatgcatgtcaaaggacgtatactcttatatgtttacttgcccttgaatagatctacaaatgccgagattgataaatctagattttctggggataaagtgttctatttttatctcaagttgcgtgcttgttaaaaagcaccttccccataatattctccataagttattcctcagactacctaggtacctaggtagttcttaactactcacataccatccttaacttccatcctgactctcagcgtcaatgaccccttgagaattgatacatccaagggttcaatcctcatccgtcggcccgtacaagctccgcgatccgcgatccacgattaataatcgtcggcattcgatatggttcgctgacaatatatcaattcatgcggctgagaagctttataagcaatgcaggttaactcacgcctaataaccctggttgctgccaggtgtcatgtttcatacgcccaatattgcgttataactccgcacaatgacacaacaagcgccgcacgccgaagatgcgccagcttctcgattccggttcaatgcaactcagcctctagaccggcttcaagctgcccttgctaagcctgcgaaagtcgaactcgagaccgaccctattcccagaacgaatgttgcacgccgtcgggcctcaagcgttgccgcttccctcgaacaagacgagactcttccagagaagatcaccgagcaacaggaacacgggattggtgtgtcggaaactgtcgccagggatgagacggttctgtacctcgcgtacgggtcaaacctagcttccaagacttttcgcggagtgcgcggcatcaaaccactctcgcagatctgtgtacttgtccccgaactccgtctcaccttcgatcttcccggagtaccgtacgcagagccatgtttcgcaggcacgcaatacagggatgtttctcctccagacaacgggaccggactccaagatgacgagagagacgtgtcggacagtgaatgtctgtcagagaaggccgcgctcttaagtcggacacggcaggtggagaaagcgccggattgtgacaagcgtcaatggcacaagcctctagtcggagtcgtctacgaagtcacactagccgactacgcgaagattatcgccacagagggcggtggtcgtggataccgcgactgtgtcatcgattgtcatcccttccatcaatcctacgatccctccgaccccgtcccggattaccccacaacaccagctttcaaggcacgcacccttctctcaccagctgcagacgatgcccggtttaaatcgcaatcccagaaaggtgatgcgcttctggccagtggtccacagctgtcgtggtggtatacaatctgcttgcatttccggccggatcctaactacgctcagccctcggcccgctaccttggattgatcaagactggcgctgcggaacatgatctgcctgtttcatatcgagaatatcttgcgcagatcaaaacttatcatatcacaaccacgcgccagaagatcgggaaggtgatcttcctggctatgtgggcgcctttgttgattttgactttgatgctatccagggtatttgcaggtcctgatgggcgtatgccgccgtggctggtggctttagccaatatcgtgttttcgtgtgtgtggaatagctatgactgtttcttcgctcctgtatttggggatggcgagcggactataggtgatacccgggcctgaaactacttctgggccgtttttgatggagtttatagctatgtagattcttgcatacataatacaacaattagagaacaaatcgtttgtacaccactcatgtcgttgccgagttgcgtaacataccatatcatattccgatgatacagacatgtacatccacactgcaactctagagacttattacatatgtaatagtctcatctgtcataatcacaaaggaaattaaattcagatgactcctcgaagcacacagttttcgaaaggaaatgaaaaaaagaatatatctaggatacagatacaggtgttcggggagcgttctaacaaaacacagacacagcgaccaatagatagacacaaaaatgacggaacagagaggcctctttgaagcacctgtatcaaaaccgggaatgtggtatgggttccccaggtcgtaccggccccttcagcctctcacattttcccactcaaaaaaaggccttgctgcaacatttaacggcgggggccgatcggggggctgtacacgatcttgcgggtcttgagaggggcccacttgtagcgcttgacccagacggagacggcgaacagaccggtcaggagggcaacggccttgacacccatcttcttgcgctcgtccatctcgggctcggcggaccagttcaggaactcgacgacatccttagccatctgggaggtggtggcgggggtaccgtcctcgtactcgacaacaccgtcgaacaggacacgggccatagcaatacctatcactgagtcagaaacgctaaaaagacaatattatgggcttgtcgttacgtaccggtaccggggaagtaagggttgaagttcatgccctcggcgacggcagcaccagcgggaggctcatcggggtaaccggtcagcaagctgaagatgtagttgcagccaccgtgacggcccttggtgatcaagctgagatcgggaggaagagcaccgccgttggcggcacgagcggcctcctcgttggggtagggagcgggaatgtagtcggaaagcttgccggggcgcttctcgatctcgccctcgttgttgggctcggtgtcgtactcgtgctcctcggcgaaggccttcatctcgtctacggtgtgcatggtgccgaccattgagcgccaggggacacgagagagggagtggcaggaggcgcaaacctcacggtagacctggaaaccacggcggagacttggacggggtcagtacaatgtatgctggtgagagcaaaaatgtgactttgggaaaagagcactcacgcggcgtgatcgaaagtcttgttgaaccgctcgtgcacccaggggtactgagtagcgtggagtctggataaaatcaactgttagcttccgccattgttgtcaacctggatcacacaatgctcggctggaccgaagccagaagtacggcgatcttcctggggcatttcactcacccctcctcagcaggtgtcatggcgaaggcctcttgaccgtagaggtggtagtaccatgcggtggaaccggcggcggcggcagttgcaagcgcagcagtgagtgtgaggtagaagggggagctggcggcctcggcgccggcggcggtggaagaggcacgctgttgaatattagcaacggagcccttctttaattcaatacaggctcaaggagccaattgtcctcttccgtgaagatcaatggggtgagggcgtaccgtggacttcccgagggactggcgggcgacggcccggttggacgcgcgcaaaatggaacgtcccagcatgacgaagtttaacccaagcaattgaatttgatcgggaatgggtgctgtatcgccaaagcgagaggggggtgggtggggagaggaggggggatggtacaggagagaggtgctggaagttgaggtcgaagtcgaagaaacttgacattgatgattacccccttgctctgattggctcccggccacgctagaaaaccgactctcggaacatcacaattctgtggacttacattggattgatctatataaaatagactagttcattataataattcattagattctgtctatagcttcttgttcttctcgtggtcctgtgttctcgctttttttttgctccggttgtgcgtgtcccgggattcaccgagaaaaacacgcatcgccggaacagtgtgtgctattcgaatatagctaggagatgtccaaaccgggttgctaattgctagctatacatatatcaactagtctatatttcccccagtattcactgtcttcctcaagtgtcgaggtattccaaaattccctgtactcccacacatagctaagtattgctacaagctatgtttagctacctatatcagcttttattgcagattgcatcatatcaggagaatcccattgatctatgtgacttcggaggcccccattggtccaagaaaaaggagttgggattgagaagttatgttctgtgtcagatctcgaccctagtcacgatgtatatatttagtcaccatttaggcgaagttgtgctaacgtctccaacttgtgtaaatcattctccccatgtttaccaagtctccgtctttgagctttcaacagcgttagagcccaagtttcattcaatccacttattttcgtccaattgaagaaacactaattcatttacatcgtacaaagctactgcgtatgagagggcggtgtacattttgccagccggggaggcggcggcgttggaccctgtccgtgcgtggtgatcgtgcagccattggaatgtggtttttgatttgctgttgaggaacaagtggttagatgtgaagatgtctgcatgagcatttgataccaaagctaccaccaagacgccgtgtctgctcgatattgagaccggaccaccctctacaaccccgcgggacagcttggagcgagtccgaggccgccttaattcccgagctccccacgactgctctctctaccgatgaagagtccaggaacacaatatgccaggtgcaaaaaaagggcctacggctgcagctcggccacgcagagatgtgctggcctcgctgcgcatggcatcaatggaagacatctccagagctgctcttccggcaggtacgcaatgtgaagacatacagtggcaagggagatacatagctgacagaagggcaaacagagatcgtatcctctattctcgactatgtcggccccgttgatctgatccgagcggcacggtcctgcaagcttatgcacgagatggcgtacgatgacactcgatgggtacacaagctgaaacgaatcgggtgttgggacgaagcagatgctagaaagcatgccgaagtggtatttgggacagtcgccaacatggaagccgtcgagaaacaagaggaggctgagctgggcgatggaccagtccctgcgatcactgttggggatgacccttccaatgacctgaaaggaatatccgatggattcgataagatcgaattagtgaatacggcgtcgcaaccagatatgttccaggatatcctggatgaacccgtcctgacggtgttgaagcaggcgaggtcaatccggggcgaggcgcgtcaggaatacggcaagatacatgctgcactagcaccgttctatgaggatatcgtgcgatctggaccatcgcctgagaacttggttttcgcgaaatacaaagatccgctggcccaagcgcaaatactggcacagttggtaatgttctccaagtctgatatgacgcaaggatgggacgagcgggtggaccgtttagagcgtacagtctcgatgtttgagactgctgcgctgaaggaattccgccaggggtatgaagccgacgatattgacgggaccatgcgaaaatacgcacacattctatggacactcaacggtgggcaagctgccgtggatctctttatccatcacaatcacctgatgactcggaagtccgacctaggaagcgtcgcttcctgcattgacggatcgactggccaggtcaaaatggagcaaacacaggctttttttacacgtctcagtgtcgccttcaacgatgaaatatccattatgaaccgcgtctttcccccggccttggacgtctcatcaacctttatgtcgaaagttgggcaagatgtgttatatcctttcctcacggcaatatttgatgagctgcatcgcgtcaacatcaagtcatacctcactgcaatctcgacgacttttgtccaatgcatgaacctctcggaggctctgcttcccatacgaggctctgatgctaaattcgacgagtatcttgataatgtcgtgatcaagatctacgagccacacctcgacctgtatttggcagaagagcttgattttttcaagaaggcctgtgaatctaccgtgagtgagtgggaccggcatctctctgaacaagcggcctcgacggagtcttttttgatgtcaaatgttaatcgccaagccgacaagcgagacttccttacttctttcaagaaggtgatcatgatgccggtaaacatcctaccgagcttttcaagtgccaaatcaaacgaagattcgaaatcagacacggaaacaagcagtccaaatccgttccaaccatccaaaaataccaatagattttcgacactatcgtcgcctgcccctgtggccgttgaggaagttccaactacagagctggcagcaaaagcggctataatgaagacgaagatggaaggtatccgctcgttgtttagcatcgaaattgcacttgatctagttcattccgccaagtccagcctggagagagccgctcaatttgtgcgacttggcggcgagtatggccatgccgcgaagcaacaatgcgaggcaattttcgtcgctctgctacgtatattggggcaccagcacgttatcgtcggattcgataaagctgtcagtcacctatccaactaccggcctcgcgaacaaggggaccgcgaccaatctggggtcgagcccctggtcacctttttggaactggtcaatgtcggcgatttgatcttgcaaatgatggatgtattctatgagcaggaattgatcggcatgagattgactgatagaaacgattttgtggatcccgccaataaagaaaagaaaaagttcgaacagatgctcgatgaacgtgtcgcggctggcctgaataaaggaattgacgttctcatggaagaagttgactatattctggcaacgcgccaactagccaccgatttcaaccccggcgtttcctcagatccacaccgacagaccatggacgtaggcgtcagcgaagtcgccatcgccgtcgtcgacgtggtctcatcgcacacgcagatgttagtcgggagcacggacaagagcaccctagatgtgttcaatcaagaagtcgggctccgcctatttacggcactctgtaaacatctcaagcgacagcgcatcagcgtggagggatcactcaagttgatcaggtatgtatctcggtcttcagccgcgcaaaacggcaagctgactagacttcctagtgacatgaaccactatttcaagtatattcaaaccttgcgaaacaatgagctccttctctatttcacggcgttccgtgagctcgtgcagatttacctgatcgatcctggccacgccaaggaactggcgactgtcatcgcggatgcagatcggttccatgggatctggcgtgtggaagaggtctatgagtttgctgagcgccgggctgactggtaccacgtcaagcgggacgtggaacgagctatgtatggaattggttgcaatgtgatgtaaatggatacggatacccctggaaattgcatagtggcatatacctaggtagggacctacaacgcggacatgcatgttggcacggaatactctcctagggagggtggagtgagtatataaacagcgcttgatgtacaaatatacgctagatatttgcttctagattctagatccaaggatttaatccctagaggcaaataaattgaacattaatgtctccaagtcatagtctcagcgagacaaaagaaagcgacacgagacgaaccgacgaagccgaaagattaactgcacaaagaaaataaagacaaaccgaaggataaaaccacatctgaatatgaaatatgaaatatcgaacatagaatatcgaatatatcgaattggatacgatgcaacccagccctaagagtctgacgtcaacggcggctgctggaacacgactgcagcgtctgaaacggacatgaagaaaagtgactgtcccatccaacacttttgcctggttgcattctgagaatttcaaaatgtctttgaacttttattttattcctggttccccaggaacctttacctttcagctgagtacgaagtacgtctttcgaccccgtgaagacgattatctgactggttttctagatacctgcattgtgtctgcgtctatgagaacacaatacacacaataaaaggctgcggctgcctaagacaatagacaatacacgactattgcatcaccaggcattctgtcctagggacgtcgtcagagcttaggaccgtgtcctaaaccggatcggagccaggcgctacgacaattgacccaacgcccataagcaaaaaaacacctgaggtcatgcattagcaaactacagctaagaccaccatctgcttatagcttcaagtcaaaaagaagaacaccgatcatcaaaatgaaccgaaacaatcacgccaaacccacacgatggctggccatccttatgctcctcaccatgcaaatactcaacgcaaacgccgacgtagtaaccgtctggactacgataaaattgcccgcgccgacaccaacagcgccgctacatccatcctacacatccctcgacgagttcaaggacgatatgttggaagtcacgaacgagtaccgcgcaaatcacgacgccaacccgctggaatggaacgatacgctggccgattactcgcgcgagtgggctgaagcctgtatctggaaacattcggtgtgtatcattatccccataccgcgagatataagtgctaacatcgccgcagaaaagtagctacggcgagaacctcgcatacggatacgggaatgtctctgctgctgtgattgcctggggcgaggaaaggaatatgtataatttcggcaagccgacgggcttcaccgaggagacggggcatttcactcagttggtctggaaatcgactacgcaggttgggtgtgctgctttcaactgtgggtattcgaagaacgacaagtctaaaagagatgacggggccgaagttcaagaggatgttttcgaagaggatgcctttagagagaatgtcttcgaaggggtgatgatggcgcctcgttctagcggggatgaagcggaaggagatgggctggaagggttgaaggccacgcgaagtgagccgcgggctcaggggtggtatgttgtttgcgagtatacacctcctggaaatgttgtgggttcgcataactcctatttccggaaaaacgtcttgccaaagaaggcgtctgccgttgactcttcaaccgagtcttcttcgccaacaacgccggagtcttcttccacgcctaggcctgagccgtcgccgaatgctgcgacatccactaccattgggagtcagagtcagccaacgggaggtgctatgagattcgcgttggactcgacattggggataatgctggtaggattgggaactgtgggcgtgggaagggggctttatacttgagatggcttactttagacgatttaaataagagaaatacaaggttgaactttgctaggaactggtttcgtagccatctctcatgcttatccacattgcacatttggtcgggaggcgcaccgctcgatctatcgatttttggaatgtcccgatcctcactgggcttgcccaggggacctaaaataaacacaaggggacagaaggctgggttcaggcacaagcgcgaaacgccagcagagaaacagggggaaaagaggaacaaaaggaaacacattatttgcgaaaatagaacagacagattcatcagccaatgacctcctcggtctcctcgataatctcctccacaatctcctcgaccacggaatcgccctggtcctcgacaaccgggcgcgcgtcgccagcggccgcgggtgtatctgcgttctcggggagggtgaaagcctccttctcttcggccaagagctccttctcccgacggagccaggcgagccattcgctgagtacacgcttgcgggtctcgacaacggcggtgttggcgatatcgacagcgtacttgtcttcctcctcgaactcctttgagtactcgcggaggttcttgcgaacttgcttctgctcctccttgctgagaagagtggcagggcgtgggcgccaaaggaactgcttgaacttttcggtggggttctcggagagggtagtgccggagaaggtgtgcatgttccagccgttctccatctatgatgcggtcaatattatgaatcagaaaagatagaactaggttaaagcttaccgagtgagtccacacactggcgctgctgacaacgtaacgaccagtggagtcccagtcaacatcggtgacaccgtagtgctcgacggtcttcatcagctggaggttggctgcgagatccttctcagcctcgatcttctcgccctcgaagtccatatcccagaagtccagatcgaagttagtctgggagtgaaccgtcgcgacaacaacgaatcggcccttgggcgaccagtagatgccgttgctggtcttcttctcaatagtgcgcaccaacttgaagttaccggcagtgtggcccttcttctcaggcgcgaagaatgagacggaagtcttagggaggacggcagcaccagttggtgtttcgccgttggcgataacgacgaatcgggatccattgggctcccaggcaaagttaatcacagtatccttgaggctgtcaacaacctcaacgggcactcccttctcgcgaacgcggaagatttccaagttagtagccatggacttcttcgacttggagtgacggtcaaccttgacacagacgtaggcaccctgtgattgccagtgcagcttgacatcggaaacgttgaacaggttacgggttcggacgatctcctttgagggcacgctcatcataccgacacgggcagggttgctgccgatttcaggagtccagaagcagagcaattgctcgtactgcttgacaccttcgcgggcgacggtggcaggggaccactcgaagtccatagcaccctcaatcttcaccgaagtgcgaccaagaaggttcatgttgggaagctcgtagatagagagggattgaccctggagcatgcgagcaacgtacttctcgtccgcggaccacttgaaggcaggccactgcaccttcttcttaggtgcaacctcgccctcgatctcggtaggggcagccaagtcgtgcgacacgaacgaacggagaggcttgccagtctcaatatcccagacaataatgttcttgccgtcttcctcgtaagtcaatataggttggccttcctcgacctggatgggtcgtgctgaccaagttgtcaagtagccctcaagcggggagaactcgatcaactgcacgaaggggtgagggaactgcttttgcttggagaaggactctccgccccagagctggacaccctgggggtggacggaggcaaggaatgtacccttgggggaccattgaacgaacagttgtgtccagtgagcgcgatccacgacattctcaggtgggtttgtcttgttgttccagaacacaccgaccttgtcgttacggtaaagggcgaattgatcacgggcgttggcatctcccatccacgagcgcaggtgctccttctccttgaacggctccggggcgggtgccttgtattcttcctcgacccgaccttcgcgaccataacgctcgatatccatcaacttgttgacagccataatgtgcttcttatcgagagggacgccgtgcaactgcttgacggcggcaactgccatttccggggtttcatattccacaaaggcgaacctatatcccccaattgaagttagagatcgtcgaacatttctccgcatctcattggatatccaatacgcacccttcggtcattttcttgtcgttaacgggcatgaaaaccgcatcttcggaggtgctgccgacggagttgagttttctcaataagaacttgacgagtttttgtcggctatcttcgggcacaacggggaggccatcgatgacgataaatgtatccagtccctcctcaactttcacttcatattgctccttgagatctgtggactaacgtgttagagagaggggcacacagatcacgagaaatcttgcactcaccggagaaatcaatctcctcctcctcttcctcgtggagatcctgctcagacagggtgtcgaaactgggcgccatgatgggtataccgaaggcgtctggaggcttcggagcaaagatagatcggtgcaatccgctgatggattttcgggcagaaacaaatcgcggcggccaagcgggttctttgtgtggactgactcagcactgagtcagcactatcgattaacgcctcaggcgtataactacacgtgactgagctgcgcatgcttagtcacgatttccccagcttgaggtcgggcccgtcaatcatctcagacgtttctagaggctcttcattttgggatacaacatttcttttagactgcatatcttgcaccaagctctttatcaagccaaacctttgtctattatttcattcataaccccccgtttctgcatttatttcgcctgtctttctctatcttcaatgccccgccggtcctaagcgccagtgcgacttgagtatagcccacctgacaactccgagctctccctcgaccaccatactcctctacaaacaccgcgatatcctcaattgcgaactgcaaagctcgaatcagctcatacgtctcaacataagcagccaatttacgtgatctactagtaacaagatgtcgtgtaagctacctcggtgttgccccagtgccaatttgccggttctccaaaaagcctcccaactaatcggtgatcttgcgcaatagtgacttctgacgtgcgcagaaaatatatcgaaattattgacgacattctggccaaaagcgacctcactaccatctccgagaagcgaattcgcaagggtctccaggatgccgtcggctatgatctcaccccgatgaaggtcagtcaagttacgtcgattgatggcgcattattatttgaagttatccaggatgactagcgatgtactgtggctgatgttcgcaaagtctaccatcaaacagctgattatggagcggtttgatcgctacgccgaacaaaacggcgtgggcgggtcgcccgatgaaactgccccaagcaatgatcagcgcgatggtgattcagcgtcagctgtgccctccccgcccccctccacatctccggtgaagcgccaggcctccagcgatgccacttccgagcctgcgagcgcatcgcctcccgccaaaaaacacaagcccgatactgataccgacgcggatgcggcgttcgcggccaagctgcaagctgaagagaattcgcgcgcgcgacctacccgtgggggcaacactcggcgtgcagctcccgtgaagaagaggagcaaagccaagacctcgaagagggtcaaggcagaagatgattcagacgttgactcaggcgaagagcccaagaaggaggttaaccgaaatacaggtttccacgtatgtttttctatatcatcctcccaaaatatcccagcaattttaacacgaccatagaaacctatgaacctttctgaacctctgtctgcacttctgggagaactcacagtgagaaccttccccgtttcttggtcactgggcctttgctaaatttcacacagctttcacgaccccaaactgtcaaaaaggtttggcaatacattcgcgagaacgaacttcaggaccccagtgatcgccgccaaatcctgtgcgacgatgctatgcgggctgtcttcaagcaagatcgagtccacatgttcaccatgactaaaattctcaatcagaatttgtatagtcccgatgaatagtccggcgctgacagatttgctttgatcattatggaagagcaggctccaaaccaagccctgtttcttaacgattctccttcgtcttttatggttctttttattgctgtttcctttttttgcgatgcatggggatgctggcgtgaacttgagcaatttccgctcgccattcttatttgtttttgacttgcttatgctctccagcgggagttagtgtagccttccattggtgattctcaaaggtcctcgaatctactacctacatgatatacatatgtgcagatccttcccacgtggatcgtagattatagccttacaatatgggctcctggttcgattatatcattggacatcatggatctcggcgtttgctcgctgcacagctcctgatgctcctttgttaaacctcccatggtctatatatgactgtggctagtcgcctttccatcggcatgcatcaaaaagtcttttaatcggctctcagctcatccatcgattttggcttgataattcaggccggcgctaacaagcctatgaatttgcccaatatgtgtgctcaccggggcggtatttgtacaagggaatgggcaaacgcagcactactctttgaatagataatctatgggttacccagtcactcagcgcagctttgttcgcggacaaggcgagtaatcggttgaagacctcaatcctcatcgaatgcggcatgcgggatcagtcagcggcatctcactttttccccagaaccactcccccaccacaatccacaaatcctagggctctacagcttcataacacccgatattgacgccaactcgcagcttgtatcgtgacattcctttccgtctccgcaatggccgacaaccaggcctcaaacccagtctcttctagccagggtcgcggtgggcgtcgtcgcggccgcggaggggcagctgcctccggccgtgcagattcgcaacacaataccggcgacggagaaaaacgccctaagcctcgcacacgcggcggcggtcgcggcgcccccgctggcgatgtaggccgacaaactcgcaataccgatcagaccaacaaactcgatacccagccttcgaaagccacggcgccagcaacaaggaaaccggtagaagcggccacggacgatgcagacgatggtgaagtctgctttatctgcgcttctgccgttgaacatacctcggtctccccctgtaaccataggacgtgtcacatttgtgcacttcggttacgggcactgtacaagaacaaggcttgtgctcattgcagggtatggtcatcttgcgactgttcctcgaggatctgaggtgcttttcattagaattttgtttcacaggctgacttgtataagactgaatcaaactacgtcattttcacagatgatccagcacggcgatatgaggagttcaacaagaaggactttgctcggacggacgaaaaccttggaatcgaatatgaaagcgatgagatctttggagacacagtgctgttgctgcgatacaactgtccggatgaggactgcgatgtggcatgtttggggtggccagacttgcatcgccatgtaaagagcaagcacagcaaagttatgtggtatgtcgataccataccctacgcaattattgaacgggcaactgactgcaccgtccgaacagtgacctttgtactcgtaacaagaaggtctttacccatgagcatgaactatttaccatggcggaattgcgtaagcacgaacggtccggagatgacaagcctggagctatagaccagagtggcttcaagggacaccccgaatgtggtttctgtcgtcaaaggttctatggtgacgatgagctgtacgcccactgccgcgataaacatgaacggtgccacatctgtgaccgacgctcctcccaccgtcaacaacaatactacattgactacaacgcattggagaaccacttccataaagatcatttcgcttgtctggataaagagtgcttggaaaaaaagttcgtcgttttcgagtcgcaaatggacttgaaggctcaccaaatcgaggcacaccccgaaggcctttctaaagacattcggcgagacgcgagaatggttgatttggccgaattcgataacatgcgcgctccttaccaacagcaacggcagcgtcgcggtgccggtcgaggccgtgaccctaacgccgagccactaccagtatccagtgcacagccaatgacccgtgcggaagttgcataccagcgacagatggctatacagagttctcagtctgtctcgacgcggaactttggcggccagctgactcgagatgacgtccaacccgtacgtgctccagagcgttccgccgctgccactcctgtgcagtctgcccccacaccacgctctcagcctcttcctaccgcagcatttgaaggcatgaacatttctgccaactccgtgccagccactccacaagaccaggcccgccgaatgcgccatgaggccgtggttgaacgtgcttcgaacctcctccgcaatgatgccaccagacttgccgaattccgtagtagagtatcaagctaccgcgcttcttccatctcggcaaccgagctcatcgatgccttcttctcgctatttgacacatccagcactgagctgggcaagctcatcaaggagctcgctgatatctacgaggacgagtccaaacgctccggtctcctgcaagcctggaatgactggcgtgccatcaacgaggattacccagcccttccagccggtggtctcttacctggcatgtcaacaggtgtcaacactggcggcaaccgcgtcctgcgtttgaaatcatcaactgctaaatcctcccgctccgctgtgggcagaagcggcgccctcccaaccgcctcctccaaccccttccctcccctctctgccgcagctggtccctcctctcgtcgtgggaaagctcccgctgctaccccttgggcagcagcagccccgccgacatctttctcacgtcccgcaatgcctagcccggtcagccgcccatcatctgcagcaccgtcttccagtcgtacgcccgctgcccctgtctccaggggcgctgattcattccctgcgctccctgcagcacccaagcccaatgtcctcatggctggcaagacgcgtggcaccgtccgttggaacgataaccgcggccctgcgcccaacgcatggagctcagccccgagttctggaaccgcctctccagctgaacccgccaatgatgactcaagtaatggcaagaaaggaaagaagaataagggaaagcaaaccctgttccactttggctaattcactgtcacattttgatagatttacgtttcttatgttgattgggcattgctttggcctatgtttgattgacagcatgacggggagcgccattaaaaggtatatcatgtgttggggtaaatttcttgttatttttttgctgtacctactagcgaatgcagatacaatgtattgtatagaggtaatctgtgttgtctttcgcgtgtttgatgccatattgaggaatgatgcggccttgacaaaccgttgaccgtcgccatacaagtacataaatatgatctacaggaatagagggataaaaaggccggttcacgtaccatcataatcaactccaagccatcagatcaacaccacactatcgttgtcagtgatattctcggatgcagaatccgaatcggattcgatcagaataggctcagacacccgcgtgttgcccattcccttactctcacttgaacctaacgcttgggtttcaggtgtatgaactgacaagttggagacaggttcagtaggagcctgtgtctcactttcatcatcggggcatagttccatttctctgttgatagcagccatgcgcagcacaaagtcatcctgcagtttaatcaacaaagcccgaagactagcgttatccatcgtgccgtcacggacaaggaacaactgttcacgcagagacaaaagcaacttccgcttctgggcaatagcgacagctcgcgacgggctgttcctacgcttagccagctggtccattgcctctgacacggatcgcgctttattcaagacagcaggtgggaggtcagcgagctcggcgaggatgagcccgtaccgacgatctggaacaggaccttctgcaatgcggtactgcatggtcatcttcgatgcgtcgggagcgatgtctgctgctaagtggagattgatcacaccgctgcgctcggcgagaatctgcgccaggtcgtggaagtgcgtgacaaaccagaccagggcattgctagaaatgagtgcttctgctagcgcgacggcaatagcaagcccgtcggttgtgctagtgccgcggccaagctcgtcaatgatgaccatactacggggctggatgttacgaaggatgaatgccatctcccgcatttctgctgcgaaggtcgaaacgttggcgtctagatcatctgacgtcgcgacacgggcgaagagctggtgtgagattgggaaggaggcatactgagctgggacaaagcagcctatctgcgctatgactgtaatcagggctagtgagcggatgtaggtcgatttgccgctcatgttgcagcctgtgatgatctggaatcttgtttgcggtgttgcatatgcgtcgtttgggatgaacttgctgctatgaatctgttctcgaatcggatgacgtcccgccttgatagcgagagtgtcggtcagctctggtctaatgtactcattgttcgttgccagctgagcgaatgctgcgagcatgtctagcattgcgatcgcttcactgactcgaaagagcccggatacttcagtgcacacgtctcggagcaggtcctggattgtctggtcgctcatattgatcacctcgctgtgggcatctgtgatcttttgattgagcttgaccaaatccaatgtctggcactcaatgcggtttcgcttgcggtaaacattgatgaaaatatcgggaagtggacctgattctgtagcaggtatacagatgtagtattgccgagctgtgtcatacttcaagtccaagaccatgtcgcaactctctgagataggtcaatatcattcgtgaactgtcatgatttcagacctgcctgataatttttcaatcagttccatggcgtccgcatttgcctccttgtaggtctgcctcgcaacatccaatagactgttgacgccggcctaattcatgttagcaacctgtagccagtgcacaagtacacgactcctgaccttgacacagtaaatgcgctggttcctcagatcaagtggctttgactggtaggctacatgctcattcaaagttgcgtcaatcagctcctcgactgaacgatgcccctcaggagcgcacaactaaagtgcattagtttgggtaaacaccaaagggatgtagagtctacttcgcgtatggtaagcagcaaatcgctttgtgctgctccaagcgcttggaagatgtttttgatcgcagaaacataggtcttcagcatgatgacattgttaacggactgctcgacatattgaattgttcgcttggtggggaccaagatgatcttgataatccgttagcacgaaccttcaatactagctagccttggagactctaccgcagtcaacactttatctgcatcaatgaaacccttgagagcctgcctcacagagacaaacatatcctctttggtggccagatcttccacagcattgtatctggctgtcaacttgactcgttctgttgaaggctgcaagatgctagctcggagtagtctggctcccataggcgtcaatgtctcgttcaatagaccaaacaagctttctttagacttcgcattttgcagattctggataagttcgagggatacaatagtcgccaagtcaattgtcatggacccctggaacggttcgaagcgtatccgaagagaatgcgtggtaaaagaccgctggagttcgacctcgacatacttgagagcctaattcctgtgtgagctgttcttcttggcaacataaatggtgttcatactgcagcgaagcaacacgcggcgaaatagttcccgcccagagttaccttgagcgagtcgacttcctctggaaaagccagccgttccacatactcgtgacctgtcttttcagaccaccatctgcggtccaggaaggtgtagatagggtctggcagattttcttgaataatgtaacggagcttcgactctttggcagtgttcatgaacagaatctcgctgggttcaaaaacaccaatcttgatgattgtcttgacataagtctggctgtcacatatctgacagagcactgcttcagctgttgcaaggttgacaaatgcgaggccaacggtggatgagacgcctcgcgattcactgacggcgcagatgatgtcctgcgctgcaacactggtggctgttgtggttggtcttgctgttggacgtctactcgtacccctggagaccgatggtgaaaaagaattcagagaatccaatgaattcaacgaacaaaccgacatcatgaagcccaactctcatgaccgagatggtgtagatggatgaatcgatagggccgataagataagcgtcgggatatttttgcttgtcaaaatttctcttcttccccccatcgacctcaaaatcaataaccatggcgaccctatatcctccccccagcaagcgccaaaagctcgttcaggccgataaggcccgtgagcagcaggaaattgagagtatcccgtccgatttgggtagtgttcgagttcaattcttcgaccaggcaacggggcagcccaccgggcctgctgtctccgtcccagtcgccgatgccaatgtgaaaaaccttgagactctgctaaacacattacaaggaaatgtaagattcgaaactcgtgactacttgggaattgagtgttgtattgacggcgatttctttccaggaggatgatggacgagtaccataccgatttgcctaccattctgaaaaagaggaacaaacgatcgacatcctccgtgatgtgtaccactccctactccagcccgggatcaagaccactgaagatacggtatcgctcttctacacaccacaggcggttttccgagtgaaagccgtttcacgatgcgcggcctccatcgcgggccacggcgaagcaattctagcaacatccttctccccagtctcatcctccaccatggtctccggaagcggagactcaactgctcgtgtttgggactgtgacactggaaccccgaagcatacgctcaagggccacactagctgggtgctggcagtcgcatactcgccgaacggcgccatgatcgcgaccggcagcatggacaacaccgtgagattttgggatgcaaagcagggcacagcgctaggcacgggactcaagggccactcaaagtggatcacgaatctggcctgggagccataccacgtgcaggagtccgggcggccgcgtctggcgtccgcctccaaggactcgacggtgcgcgtgtgggacgttgtctcgagagtaactgatcatgtactcaccggtcacaagtcgtcggttacttgcgtgaagtggggtggtactggcaagatctatactgcatcccacgacaagaccattaagatctggaacccgaaagacggcaccctgctccagaccctggcggcgcatgcgcatcgtgtcaatcaccttgcgctatcaacagactttgcacttcgcacctcctaccacgaccacactggcaaggtccctgcgaccgaggctgagaaggttgccgctgcgcgcaagaagttcgaggaggccgcgacagtgaacaacaatatcgttgagcggttggtatcggccagtgacgatttcacaatgtatctgtgggagccgtccacttcgagcaagcccgtcgcacggatgctgggccaccagaaggaggtgaaccatgtcacgttctcgccggacatggcctatatcgcctcagctggattcgacaaccacgtcaagctatggaacggccgtgatggaaagtgagtattcgtcatcttcgattgttgtgatttatagctaacatagccccaggttcattaccaccttccgcggccacgtgggcgcagtctaccagtgctgtttctcagcagactcgcgtatgctggtatcctcgtctaaggacactactctcaagatctgggacctgcgcaccggcaagctcaagatggaccttcccggacacaaggacgaggtgtttgccgttgactggagtcccgatggacaaaagatcggcagtggaggcaaagacaaggcgattaagatctggcggaactaggtctagtcgcacttgacatcaacttgcccagaacatgctcttgacagacaggtagtctctggtataggtctttgccgtctggtgttgcatgcatccaagacgagcacaatgtccaacgcgcggatgttggcagtagcaccttgtatatgccctctagggggaattatgggtgtctcaaccccaagtcaaccctccgtggttttgatccacattataagccgataggcttatctattccgtggcagagacccgcgaggctgccttactgcatgccacttcagtggcctggataaacaagcgaatacagggactccgagaggtgctcccgtttcggactagatcttgcaatatagatgcatggaagttaaatgatggtttaaatgtgtggattgattgatgtcctgtctactgcctggggcataggaatatgataccataggacggacgccctttatgttacttagttgcactttcacgaatatcattttttgcgtattgacagcagtgtctcaccgtagagctctacctacatatgtacatgtacatatgtaggtatgtaggtactatacagacaaaatacagctgactgcctgaatgccttgcacgtgtgtagggaagtgtgtagggaaggagcaagtctcgtgtctgttttgggaaggtacgtgtgtacgtgtgttggatgatttgggaaggtgcgactgttatttggtttaggaaggcacgcgtgttgctggaggtataaaaggacccttcccacctttcttcctcttctcttcttcttccttcttcttctccccaaccccctcgaccacaatgtctctccgtagccccctgagacggcgtaggcggagggtgccggcacttggtgctcatatctacggagatctcaacatcattaccattgttgtggtctgccgtatgccggacgatacgcaccctgatcaaaccccagttctcgtgcgagcccttgcataaagtcatggctgagtatttgtgcgcacgaatactccatagccattggcggtcccacggaatacattctctactaggtatacttttcctattcttttgtgatgtctcttttgtactattttaggtagcgtagagtgagacaggtgttacccttcttccacaatccctgcagccagacagaatctaacttcaacctaattcgactctgactgtagactttaaccacaccggtgttcttgaagcttctcggcccgttaccgcaggtcgagatacagccaggtatctacgatccagccctacgacaagaacattgaaaagtcattgagacagattatcactgtattaaatccaaagagcctggatccagatattaaggagcgtaattatgatatatccaaaatcaaaagctaggaaaacgacatcgaccacaaagccatcagatcataaaccacattactctagatatactgccaagcaggaacgtctccagtgtaatccaaagcgacggcagagaaaccgagacactcatcaacattaccctggggcacagtagcattttgaatagcggcaaacacctgccagcggttatcatcagcgggacaagccatgaaaccactagcaccccaaccagcgaaggagtagtgagcccagggttcatcggccgcgtagtggaacgggccgagggaggagccctgcgggatattggcggagtgggcctgggtgaagctgagggcaccagtagggtcgatgtagacctgctggccgccggggaccattgtgtcctgttgattgttagggggttgtactttgtaggtaatctgtagggtgggaatggtgtataatgtgaattgtgacttaccagagagctgccgccaggagcgaagacggtttggttgcctggtgggcagttcttgacctgggttgggcagtaggaggcggtgtttccgccgaggtagaacttctggccggcggcgttcagctgtaggtagtggataggcgaggcggagcggatggccatgacgctgaaggctgggtttggggctggctcgctaactggcgccgaggcggcgaggagggggagggcgagggaggtgagtgtgaacttcattgtggattttgggtggtgttgagggttgagggttgttttgtgaagttggatagagatgtttggtttggatgggacggacacagggcggttgttggacctctttatatggaccgatcaggagagcaatataaatagaagccgcacatgttccgagaagaatggaccaaaacatcaaaggggcccgtcatggacggatttggccgctacgatggctgaggtggcgagggtctcattggatggtgaatggtggatggggtgagtttgagacagcattgtactctatacactctatatttcgaatctaattactttctgcatcgtttatgcaacgctgtgaggttgggttactaccgaggatgttagttttcctcgcttagaggaagagacgtgagacatggagaaccgttcgtctgccaagatgagggaaggcctctacgctaatccgagtggctgatacatacataacatagtggattgaaggtgattagaagtggattgggatatccgtcgaccttggagtattcggggggttcggatgaagatctttgcgcttgtctcaggttataattggaacttcagccacatcacgactctcatgctccaaggatcttggtaacagtcggcttaacccgcagatatccactttattccatccaaatgacatcgacggagtacgttatacgttatattcgttactcaaaaccctctaatatacggcataggtcggacttccactctacaacataccaaccccccacgcccccataacacctcgccttctactttctccaggaaacaccgacccaccaacggcccgggacatgaacgcatccattaccagtaatttcatcagggaacctcgtttccggggaaacaatcgcacaccgtccaacgccactgacgctccatctgaaccggcgaacatgcagcaatatgcaatgtctcacgacatgcatgccacgccctgtgccggctaacctggctatgccgaagacgccgatgaagtccggttttgcgactgcgtcggggtttctaactgtgacggaataataatgtcctgcagccgacgctgcagcacccatacccggaaaaaaagcgaccccgtctactgttatgccttacagatacccatatcggcaatgcagaggaaaataccaccctaccgcattggcgaagtttccgtctagaagacggtgctgccctgtttcaagatgtggcgaggatggcagagccagttgggtgattatccaggccggttcctgttgaaagatcatccaaagatttcctggcgcgcctgggcgattggaatcaagagagaggtgaggtcagtccgttccacgggtgttgtacattgtccgacgtggggagttcgttgaggttcatgttggtgtgtgtgttgagaggttcgtgttggacaacccggtgttttcggctttctgccagggacggtgtgacgtcttctgtgagctgggttgtgtggcgagggtatgatggtggttcgaatttgttgaggtttgttgtactacgctgggtgtgggatggtatgtactatcctttatggatcatgtgctgtgtagggattagtggcttcccggctgctttctagaagtggaagatggaaggttaggatgatgtttgggttggatattggtgctatttttgggcatttggtcgaatggatggtctgccatgggtgacatggtcggttctaatactggttggctagtagatatttctaatatcagctgagaaatggacatagcgtgtacattgaataaatggagcatcgtgagacttaaatggccaagatattttcgactgcgactatattgcatattgtctattggacatggaatacacatctgagacaaagctacgatctacaggacccactcgacacctgtggatatcacagcgagtatattactgagagcacaacatccggatggataactaagcaacagtggatttggatatcaaacgactttttctatgtcgggcgatcagcctcggcactcagcaattcaaaccggacctcgattcgccgaaagaaaagtgtatgtacgtgcgggcaatcgaccgcggaggatatgaatagacacggccagaggccaacaaaaggataaaagaaaacacagaatagaagccatgaaacaaaaaccagacagaaaccccccccagcaccggtccgtgtagcaatattgaaacccgcaagccctagtcttgcccagaacaccataagccacgcgccgccatttttccacacgtcttgattcatagcaagggaaaaagaaaacaaagataaggaaagatgagacaatacgctgagccaagtgcccccacccgcgtatcgggtaatgcactatggatcaaagaattgctcttttaatagtcgccttcatcatcatcgtctccgtctccgcctcggcgcgggccctttactccgtccttgcgaatggggatcttgataccctgtagcgcaaagcacttgctgagctgggtgctctcaataacaccggggaactttttggcggagaagacctggaagggttcagagaaaaccgaggccaggactggtgcggttcgatgaccggggcgccgttggaggtttcggtagacgtgcccacgtcaacgaagctcattttcaaactggattcccattagcgattatttcgagcgatcctcattatccgtttgaacttaccggaaagtgccctctgtccgtacactcaaatcttgcaggataaaccacacaccaattttgttgtctggatctgtcaaccggaaagcactagcgctgagacttccgatgagattgcgagtgaacatgccacccggtccaccagtgacaggttgcgcagcgggcgacatagacgctggcatttgaccaccggagtagtattgtgggtacgtcactggctgaccgtattggttttggtatgccacctgctgaccaccgtagtagttgttcatctgcggagggtagccaacggggtactgattctggttgtagcccgggtaggtcggagagacgctctgaggcgggggagggtatgaggaggacatcgcggtagagatggagggggaggtggcggaatgcttgacgaggttgacttcgctggtaccgtcggcattccacaggtcgacggtgaggacgtagaatgatgtatcgatctcactagaggaagagacggttagaaagctgagaggaataagagtagctggctgaacacacttaatatcgatttccttatcggtttgcgcatcgcgcacaatgagacggatgcatggtgggggagtgataggtctccggtcctgggatgtgttaggaagtggcagaagaataactgcggaaaaatcacccaccttgtcaccaaatccacacatacgagcccggatgggctgctgcaccacttgtaatgaccaggagcgaccgtcttggtagtttgacacgggtgccaaatggtcggattgccgtagcgaggtggtccccgacgggtactggacggacggagcagagatgcgatccattgagagcggaggtgggacgggatgatgtctatcctcgacggcgtacatggtaccggattgtaaggaaccgaggatgactgatagatagaacgggttcctgattttttatagatctatttgatagatcttaactatctggttgttcgagaagagaggtgggggggtgttttggagatgcgacatgcgaccccgcgggatgttcagacgtcacacttggagcatcgacttttcgcggctgaggagagaaacgggcgaacacagcgaacaagcagcaggtccctttgaaggtatcgaaactgatctgagctgatcagtctaaaacgactttgaagaaaccgattcgatgcgatatggcagaaaagtgaagcgaaggggtcggagagttttattcgcgagccgtagaatgagctcgagtggcgatatccgagttctgagttgaatactttaagaatatatatatattagcatcatcttctctttcagtcaaccctttttaagtccttggaagacttttcttgggtcaaccgcacgatgacgctgtcaaagtgcgggagattggctggggcttccacggatcacagaggagatcacctacccgagaaaaaaatgagttaagagagagagagagaggaaaaggaaaagtaaaagaggatacaagagtgttactctgcaggaacctggacccaaaccatcgggttttggactcttgacgaatgagatgatgagatgatgaaatggaattggagctcagagagtccgagtccgcttggagtccgcttggagtccgcattcgttcatttccgcaaacggtcatgaaattttcatccgaattgaacgagattacatataacaatatttaagtatgataaaataaaaaaaagttggagtgctgtgttctggtatatagagattcttttcttaataacctacttcacttgtatacctaggtactatagctataataacgtacataaatacataaatacataaatacataaatacataaatacataaatacataaatacatatgcagtatcacaatatcactccagaactactgagtagccccttattgctgggacagccctggagggctgggcagatgtaccccttacagcgcttgggctcccatgaggatgacaggtcccgggtgtttggttaccccctggaagggctgatctatcatattgtacatatatattatcatgttgtatgggatgtatcactgtgaaatactgtaggtctacggaaatattaccaaagatgatcaaaccgcgtacaacatacggagtagtattaactccttattacctacctaggtaggtatgtatcttttggtaaagctatcgcttaatccccaagccattattatactgctgatcatccccagaacctattgaccaatcgacactcgaataacttacctcaacaaagcccaattttgagcaggcaaatggtctgatttgttccgtcactgctcgcgtggatgtcgcttataatctgctacccctgaccccgtaccaaccttgtccaccaaagcttcctccatctccacctccgactttacggtcggagccaagacccagacttccacatttcaccctcgacttctctccgttctccccccaaaaatgtacctgcgtcaatcgttgccattcccctacctcgccgtgacagttgctgtaggcggcttgagcaccgttcagttgtataacgataccgattaggcgatcgatatcagctcgggctactcctcgaaagacttgacgggcatttccagatcagaggcgtcgatgcgcataaatacttgaaaaatacaaatggctgggcgttgtggggctgcgccgtctacgccacccgctcccagctggaggttccctctccacacctgccgacccgtcagcctcggtgtctcaagagcttcatcgcgaatggcaatctgaccggttcgtacgccaagaggcctttgacttggctggttggatatgcgtatgatctcggacaaccactaaaaaggtcacagtaaccttggcggtcagtcagtttggaccagtcaacagaaatgactgctagatttatggtaatatttatggaggaactgaggtaacgatcctaattcaatcgcttgacactaacaacatccgcacttcctcaatgagcccaacaacggtgggcgctattttcgattttacgagccctcgcagtgtatcaaactactctcgaacccgtcctcgggtacaatagcaacggcatacaccaagaagtacaccatgcacgaaatcggcgcaggctaccctaaaagccaccggccacctttgctcggcgaagaattacgcgtagaagagagcggcagcatactcatcctagtctatacctatagcaccacggctggcttctgagcaaccattcacaaagaagtggctatggcgctcaattgtgaccttggttggggttggacaaattgatgatccttgtggtggttgatggcgctgcgtgtggactttgcatcggtgaactgcatacttacgttgttaacggcttaactcggtgcccatctccaatcggtattgggtggagccgagcggtgcgtatgttgctgggcagtcgtactctttccgtaatatacctatgcttcggagtcattctgcctttgcggctttgagcttcgtgaggacgttgtattgctatttgcattttgcattggcaacagcgtctttggtcttgcacattatctgggatgtatgatctatcgatgtcaagttcaactcgacgccctcggcccccgattggtgcaccaggaaggggcaccgttgagtcacctcatgagattgacaccgtgatgccggagtccagtcatgcgagttcccagaggtacctttttcggcccatcgcgccggcgcgggaggtgtcagccaaattgtgttacacggccaatcgcacaccggcaactactacggcatgagctggccgggctacactccgatttatgttttctctgatgcctctgacaaacagcgtggaactatgacttcagcgaccggcggaactgtatgcaatatttcaacaggtctcgcatcgacgttgctctctatatcgtgatatcagccacaaaatcagacttcatactgtacgcttcagatgatttggtcgatggtggtaagctaacatatttaggagagtttctggagaggttgaaatggcggtttaatctccgcttaggttactcttacacctgcctgcccgtagatggctttgcacttctcgagacaaggtctaactaaggtggtaccaacagcaacctctgtctggtatcagaaaatacacctccggattgcaattctcagagacgaagatccggcatgtaaactactaaaaatggtacagatttacgcaccgtcgcaaaagtcatttgggtgtcgaaggaattcaagaaccagaaatgtgtctgctggccaaaccaccaccaccaaacttcaacctctcagtttccagctcaacttcgaacttcggtgtgtaaaccaatgccacttagtacaaacgtgggagggtgcaccgaacgccatgaattacgccttcttgtctgcaacaccaaacgtatcaagtggcgtctgtaaatatcaccagcatcgatatctctcaaacttcggatctggaagcaaagcctatatctgtatctgtgcccgctaccaacgcaaagacacgcatgtgagtgatccctccccccaccccgcctttattttgacagataaccaattcgtaatcatcggactcatagacaccgaaattcccacaaagatgcattttcaccagggctcggattatacggaggaattcggcattggcatcacaccgaatcccgaagcaagcgatcagacaataaaccctgaaacggagatattgaaccgtccgtcggtgtcgccaattacctggctagctaactggacccatgctctaatgcagctactatttccaccacacaccgcagtttaatcttgctgctccccgtactaactcgcgcaatttcccgaaaggatcaacatgacataagcttcggcgtggcattacgtctgcggtatcctcggtcagatctagaataccaatgagatggcgctgcgtcgtatcctagcgtcgacgccaccccgcggtagtgataatgtgcttagcggcgaagtaaaggtatcagcctcgcgaaaggcgagtgttaaataaaatagggtgatccacctattaaaccctaataaggcataataactgccctcttcatacctaggtacggagtaaacccgcccagaatagatccaccacgcacaattagcctaaatccggggattttcgcacccacaaacgccgaggcggtaccccgtacaccgaagctggacaggcccaaagtcggtctaagcgaaagtcatgtgtcgtttccctgcatgtccgagctcacagggattgtccaggtggccaacatgactaccaagcacgccatttactacctcggtacctaaacagcgctaaagtgaaccccagtcaaacaagggttggccctaagactcagacaaagggaatgcctgcggttgagtggatcgcaagtcagcctgacagaataaattgcgtgcgagctaacaaccgggggcggatgagaggctcagttctttgatgtgtctcggaaggattccagggctccattgactgaaatcagttaaagggaagcaaagctgaccgattactataatctaggcttcgagcgtttccctccatttggaattcgaagtccccaaaaagctaagaggcgggcattgtggagctgtgggaggagtagtccgagctgacgggtgaaaagatggaagcgacttgcggtaaccaatcctggcattcccaaataagaaaacacatggcttggagagctaaggcgaaaccgtgctaatcgaaaaggagcttagggcaaggaaagatcacgggctaggataaagatatgtacccgagatgtgtccacctgggtatgcataagtgcaacaggggtgcaaaagcgtctttcccgatcgggaaaaagcatcgctcgtcgactgaaacttatttcggatagacttggccgggtccatcccgctaatcctgaagtagctctagcgtggactcttctataggggctggtggggctggtgggggttgtcctcaacaactggagtgcttcttcgtttagttttctggattggaatgttcctagtggatctagcttgtgcttatactctcctaggatagagtgccgcgcatctttggcattagttcagttcgaattgggtaggtattttcatctgccgcattaaaaacatccgagttaccgctctgctttattaatacggtttggaatacgagaatatcggaagtttggggtttggattcacaataaggattcatccccatgaatatttaaggagcagcttgaatggaccttggaagcatgaagtagagctttgatccatggaaagacagaaaacatgccacatcattggagttacatatcgcgaactcggcggccccgctgggtgggtactggattatgtcatttgaagcacgagccatcctgcatttaccgatttgggacacaacgccactcttacctctttggtgctatgaatgccgattcaatgaaaatggacatatcaaaatattaacacccccgcttgggcctatgactgagatgactttttcatgatatcaatccttcttctccttcgggtgatatctggagggaatgatttcaagttcactgcaacccccgaatcaaataaacattctgtctctccacctctacaatgcaatgcgaaacaccttcctggtcaaataagcgacgccaggcgtctatgcaaagtgatcggcgcgttagagtatgaaaccccctgcttagggcttctggaccctaccaatttcagagctttccattgatagtgtggagggttcagtcccattcgcaccttccacttggatcctaccatcttcacacatgtccactaacgcaaccagtacaaggagcagagttcaacctgtgtacattgcctggattgcaatatgctcagccagtatccgcctcggccccgattgactcggctagacaacaagcacaacaagcacggctctttcatcccctcaatcagcacttcgccatcatctccaaccgccatgacagagtcctcgccctcgcagtcaaatccccaaccccgacaagagcacccaccaacatgcctctcaacccacatcgaagagacactccacctgaaagacctcgaattgatgatgcactggtgcacagaaacctacaaatccatggcaggggaccctacctccgaacgtatatggcaaacaaccatcccccaactctccctccgccacccagcccttcgccaaggcatcctagccctctcagcgctgcacctcgcctcaacaagcacatcttccggacgctggcgatatcttgaaacagcacgctcgtaccaagcacaagccctagcaggcctccgcatcgagagtgacgaagacgcaccggaagcagaaagccaagcgaccttcgcgctgtgttgcataatgatcgtattcaccttcggcttctgccaaatcgacagcgaaaccaactcagacgaagagcagcccgacgtgctggacgagttcttcgaggtattccaactcacccgctggctagtcagcatcctagtgacctcgacggaacgcatcatagcgagcgagctgaacccgctcctccaccccgaagacccgcccccaacaatgccggacatgtggcggctggtggttctctcgctacagcgacagaatgacatagaggctatgcgggacccgacgcacctgacggatctgtacgactcggctattgaacatctcagccactccctcgaacagctgatgaagggcggcgagccgaaggtgtttgcgttttcatggagtttccgtatccctgcggagtttttggaactgctcgaggcgcgccggccctttgcgcttgttgttctggcacattatgcggttattctgcaccatcttagggattcatggtggatgggcgattgggggaatatgattctgcaggagattggggaaattcttgacccggagtggcaagatcttattaactggccgattgatgcgacggggtgtttccttccgaggactcaggctcgagtgcgagtggtatctccgcttgtctgttgatggcgagttttcatttttatttgcttgcctttttccagttgcttcggcgtgagcgatgcatctaatgagacatgaagcgtgtaattagcatagacattggattgtacataacatagtttcttcaattgagacaaggatcgcttgtcatgggagtatatcatttctccgtgtttaggaaacaattccaggaaacacagatgactgcaatacacatccaagcgtatgtcaataaaaaagacaacccacgcccaaatgtatcctaagcgccgttcctttccatattccataataggtatgaagcaattcctgaatatgtgaagctgggaatgccaatcggagaacccccaaagataaaagaaaaacaaataccaccaacccaaagtccgaccaatagctgggaaggaaaagaggaccctcgcatcgaagcagcactgcccgcagtgatatctgattcgtctctgctcggacaatcacttttccagatcgacactgcagccgaagaaaagcaaaatatcctcagccaattgcagacggaaaatcagccttcatcgagccctctcatcgagaacaaatcaatcgcaaccccaactccacacccaacaacccccctaagaagaagacggcgactccttccgcaactcctgcctctcctgttcaatctccttcacacgatccttcgactgcgtgcgcacacgaataagctccgcctcctgctcatggatcttcttctcgcgctcttcctcttcaggcgtagggatgtaagcgttcgccgcgccgcctgtgggaaatagcacacccgttagcggccgcttcgacaatgtcgcgaacatgccaatttcattcgcgcagtcatgaccagaacatacctcgacctgtgtggtgggggatctgctgggcgcgcaggggcggtgactcgacgtcttgcgactcgcgcgcaatctgtggtcgctcgggatcgttgtgcatcatatttcctgagccgccgcggccggttgtgtagacttcttgtttgattgttggtgtgacgaggtctttgggcgtgggcgcgctgtgttgccgggttatgttgcctgtatagttagtggattgtggcgcttgagagacaggggcgctatttaccggcgcctccgcggccgtaggagatgtttcttgacattgtgtagacggtgaaaggtgaagattggagagttggggaaactcggtttggagtcggaaaaggaagctgtggtggggagaaattcgcaaattcgccaaatgacgacagacttttttgtcttggccaatgtaactatgccagtatatataatcttatctctactcaaacatatatcatgtctatcttctatctcatatctcaagggtttattcaatattcttatgatcaagtccagatactcctaaccacgatggagcaagggattaagggagtaccccacctttttacctatgcacataggtagagacggactgatcatatagatcggtcagagaatacaaaaggagcggttgaatatatcatggaaaagcgcttgcgaggtggatttgcctaccatcaatctgctcgatataggaatctggatgcagaaatcgagagcgactgggctctttagttgccttcagacccggtaaaaatagttcgtgtatattgtaatagccctaacggtttcgaccttgcccggatatatcctgaacaaataagtctcattctcctattgtgttagccatgtctagatgatgcgctacgtgtccgctctatgtagcgatcaacttttatctgtccaacatcccggtttgattctcattgacacgtttcagaacgccaaccctaatttagggacccagatgtgaatgtatagtatgcaggacctgacattttggctcctactaaaggaagactagtgtcctcagctgattgcagtctgataatacttactgtctttagtatataaatggactacactctatcagtgtctcgacatttcagtccagactatatttagttggtttttgctgcttactattaatccctactgattcctttctgtcatgttacattgagaggatacataagaagaagaggcttataactatgtactctgtatagagattttatatatacttctttatagtgtgcatttccattgcttttttataaagaattcccatttgttctcctatcgagtctacggtcacatttgccagaagcctgatcgaccattcctttccataaaagtcaatttcacctaagtgattatggacccttctcgtattgaagatgatatcgccgactccaaggtacttgtccttgtatcccgcattcccagcccttgcgttgtttggcttctgcgacgaaccgtattcgacaaaagccaacgttgatcattctgcaagaaatataaaaatagaaaaaatcgaacgttgagaatacgacctgaatggcttgagcgcttttcaagctgacttacgtattggaaagccatgtctctaatagaaagagcctccatctctcccccttacgcggctcaccccgacccccacaactgagccggaagttttctaagatatacgagcgaaacttagaatctagatggaatgttgcgaaagaaaggagctagactataggagagagggcaattgtcgtgcccacaatcagttcctagttaggtgtaagtaagtatgtaacctacctaggtaggaaccaaagctcgtctcctatgtgctcgaatatggaatcgcctatataacatatactgcaaagcattgttttgttatcatcttggcgcgctaaacgccaagactcgtagtttcgccgttgctcaaacattggaggctcgtacatccaagccactgtagatcgatgcagatccttaatcgcgtccaatcacctctattatctccccgtgtgggcggatatagttaaccaccccagatcttagtggttgcctattctggttgcaagttacgacccgccctagctcactaatctgtataatagtgatatctccactagcgcgatccaaagggcggagatgcctctaagacactctgtgtagtcgagtcgaactacagcgatgtcccgtcgtacacccgaacacgaaggcagttgtccgatcgacatcgtatatttggtgaattctgccgatcaatactttttactacaaagagtgaggtaggagaagggtaatacttacttaagaacacgaggtcttccctaataatgaatgtacatgtccgatcgacatcgtatactcgcgactcctgccgatctatacttttcactgcaacggctaagacagtagaggaatgataggtattcgtgaacacgagaagacctcgagaagatgaggacctactctaaaaataggacacttcttgtgataaagatattgtaaatctcgagcataaatagcctcctcttacccgctgttctctggtctttccatcaacaatcaatccaattccaatccaaatctacttcaactcaactttttaagacctccgtcttccaacccaaaccatcaaaatgcagttctctaccgtcttcctcggcgccgttgccctcttcggctctattgccttcgcttctccctccggagagatccatgcccgtctctcttgccaggtcggcgactactttggtggcggtgatgctgcttgcagcgcttctgtatgtcttctttagcttagcaaaccacattgtattttcatctctgacaattttgtagtgcattgcccaggagcagggctaccacggcggccactgcaacgatgagaggtgaacgcgcttcccttctagggtcaacagactgaattggtttactaattggttttagcgtctgcgtttgcaactactaagatggtgccgtctcttggagagccggtgccctgatttcgggccatctatttggatagcctgaaggcagaggagctttccgcgcggacttgtttcctagtttaacttctttactctttaagagtccaattatacattcgttttctctcactacattccttccagtatgacaatagtaatagtcaactggtacgacgtactccgagacgaaacctatctgcggtaactgatttatgccgcgaatatcaagccaagctctagaatctagttgattattagggatatataaagaactcctaatatcttgtcataataacgaagagtgacctttaaactaaaataaggaacactccacaatttgatataggggatctacaggctactggttacatatatgtaggaaaggaaacgggagatttctagcgaattagatatgaactgagggaagtaggcactgattcaacaagttttaatagatcccagagctatttaattggggaaatatgaggcgcatgagacaggttcgaaagaagttttatcatattgtcactcccgggaaggaccatcgattaacaatgttcctagtggcccacaatactgtcctcgactttcaaggtttacaccctctttgctcctaactcgtcctgtagtgggcagtgcccaagctagaaacatgtgcgatccagctagtatctcgcaccgatggggtaaactaagctttcccgaagattcgtataagatgacaagattgtcgaaccaacaagctcatgaatgccctacccaagatatccgccaaacctgctctggggttgggtgtctgagaccaaggtaacacatggtctatagtttgggtcatgctaagctggagacacgttattcagttacagcttccataacatatacgaagtcaggccacttacctacgaacgccagcagtccggtccacagttgcaatagcccttgtttttgaagcaaactccgtatttgctgggacagcatttcgccggactcgggtctgatacgctgcatggaactccccccttacaatctctcgcggccgctagcgcagagagagaaaggacaagtgcgatggagagagaaataaacctcatgattgagctaggatgaataggttgagtgaattatttggctagggtgtgaagaaatggtgattccactaggaaagccctacttttatatatcgctaatcaagtatattgcttgttcctaggtcaggcgcctgaactcaaagaaggaaggatttgcccattggacgcctgattgacgttgaatattcctgatgtgaatattcctgatgtgaatattcctgatgtgaatattcctgatgtgaatattcctgatgtgaatattcctgatgtgaatattcctgatgtgaatattcctgatgtgaatattcctgatgtgaatattctttgatgtgaattttctgagtgcattgcatatatgtacgtactcgcaggtgattgactgcatgggccaatggtctggtatccgagtgccgtacaacctattcttggggagacacacatccttgggcaaacagccctgtaaggaccctaggtgaagcggatgcagggtgggctaaggagctctgctactggtgagttctccttccccacgattaatttcctgtttatgagacgatgatcgcaattctctctagtggcttaccatgtcgccgagaaatacagctagccctctgcgtttataggagggctatatgtatgagtaagtcactgtcgacagtgattgagctgggggtattgggggccatcctctctagttgattatatagaatccgaactatatggctcgggacgagttatgagcacagaacatgcggaaaatttgtgaaaagctccaggatgtaaccacctaggtacatgtagttactgtacttaagcagagaacagaatgggaggaaccgattagcgacgttgctctcatcaggccaataatcgtgatgattcttttttatcaactactagatatttacccctaaaaatacttgaggtagcaggcctcaactgggtatagatagctcattgtgtttggaaggactctttgtcttcattctccatttctcctgtactcttggctcatatagtcaccatctacttcaagtaattcggagtgcaacttattccctaacatatccgatcgcgatgatgtcggtcgtccttctcggggcccgctccgcttacataacacggctccacctccagagggctctaaggctccgattctcacttcacctctgcaagacttggaatctgcaattaaaccgattccagctcctctccaaaatgaacgccaatcccatcagcatgtccatccgcacaaccatgtcccttggccgactaaaccccgccgcgccctcgctcgccggcgccctccgccccatccaccaggccacgccccagttggcatctaagcagctcacacgccttagctccacgacagctcgcccggccaccgcaacactgaacctagactctcggccacacgccaaggctgcgtcgccatcagccatcgctgtgcgcgcaaactcgacctccgcacctgccaatgaagtcaagctcgactgggactccttcttcaagctccgtgcttcccgccgccgatactccctcgcctcctcaattgtcagctcggctgtcagcaccaccgtcggtgtgcaggttctgtccggtcaggaccttgaacatctcggcgcgacggttatgggtctcgatccgtttgttgtcctgggattggcgaccgccgcatgcggtgctgtcggatggcttcttggaccggctcttggaaatggcgtttggggacttgtgtacaggaagtataagccctctgtcaatactgtgagtgctcgggagaaaagaatgaggcggagatttgtgtctggtcagtgctaacgtattctgtttccgctgtgtagaaagagaaggagttctttgatcgcattcgccggttccgtgttgatccctcgaccaactccatctctaaccctgttccagattactacggagagaagattggcagcgtggccggctaccgaagctggctgaaagaccagagggcctacaaccgcaagcgccgcaacttcattgcgtaatttttctttccatttctctcttttatatgttgtgatattgaagcatttctcttttgttcatgtccatatggttgaagctcttgaagcttctgttcaaaaccaaatctggtgactttctttttttggccgggccggtgtttattttgttacaatatcattagcggtcttggtagctggggcattgcaatgtattgggaatgacctttgataacaggtcaattcatagctattcttcctaacatttgtcaagactttcatccttcggtctttgctatcctcaatcatcattactacttccaatgtcaagctttcaatttacagcttcgaaggcccctttgctttaggattccgaccagtatcaacctccgtccaccacggcacactcggcggcgggttatcgtcgaggttagccttaaagttgggctttcgcttctcgaagaacgccgcaacgccctccttctggtccctgtcagatagtaagcatatgcaatcgccctcttcgtgtagatttcactgactccgatccaaacatatggttaatgactcgcgactcgatgagatgagcagcctctgccgaaccagtatcgcgccacataagggcgcgattgaggtacgatgaagccgggctcacgttctcggcaatctcagtagccagttcgagagcgcgcggcaggacctgcgatgcgtccgggaggatctcattgaagaggtcgccaaagtgtttagatgtaggcgggaagactcctcccgtgctgacgaggtagctggcgtttgagtggccgacaagacgggggaggaagtacgaggagcaagattctagaactataccgcggcggccgaagacgaagccgtattttcccttttcatagccaattctagaaagacaagggatatgcgcgttagcaagtgtgctctactatattttctggatgcggttgacataccggatgatcgctggaagagtcatggtcatcccaactccaacggctgagccctgcattgctacaattgttggcttgcgacatctgtgaatggccagtgcgactcgtccaccactgggtcgggtctgttagcgagactgtagagtatatatacagcgagctaatgaatggacgccttacccgtcacgatggtccgccgtcctgcctttaccaccaccgaaaccaatctcaaggtctgcaccagcgcagaatgtctttcctgcgcccgtcaagacgactaccttcacacgttcgtcgacatcgaacatggggaagagcttctcgaagtccatgaccatttgcggagtgaacgcattatgcttagtgggacgatttagcgttacgatgacgacgggggtgactgccggtgtgcctggatggtagtgggagacgacgacatggccggttgtttcgaccttttcgtaagaagatggaagctcaatggggctgggatcgaagatcatgatggatgttgggaagtatattgttttgattcaaatagacatgtgtttaactgcacactcctatataacatctctcggttatatccttcaacagttcaataatcgtcaacagccttctatgccggagcctcggcctcggctggactggcttggcgtggagaagccgggggatcaccgtcaccccgctgtggagttgtacgttatgacatttatgcaagattgtagtccattcggtatttagtgatcttagaattagctacgaagctatatatgtataggttagaacggattgttctatgcaacttggaatttcggcctattgaaatgcaaggctagtcatagagaggacccgatgatttagtttagaaacaagcagaggatagtatgtagtggaagactggaagatggatattggagataggcgagaggatataaatagaggaagagaaggacgaacctgacacgccaaagggcaaacctttttaggggccatcgcacgatatctcgccttttagaaggtaatggacatcattaatctccatactatacaagtttagaccatttccagacgtcatgtggacttaggatgtgtaaatcaaggctggtaggaccacccgattttgaggtttgaaaccgcgaagctctgatgctaacctaggaactgaccgccagccagggcaatccaaggcagatccttatcccagcagtgttgcatcaattgacgtgcattttgaatctagttaatacagcgtcagtaaatctcttgaggcgaatcgcggaccaggatagacgcacctgtttcatgcccgagctctccaatacgaagaaccggtccaaaagcttagtcctttgaaccgaatctctagattcacacccggccgtgaaaagcgggaacaaagagcagacctcggtagctgcgccaggacgcatgcgtccaagggcatcaatgagcttgcacaagacctccttcacggggaacgaatcaggcggagacccaagcacacgtcgatggaggtgcaggagaccggcaaaccggaaggcttcctcgatggccatcatgtccgcggactcaataccatggtggtgttccgggatagtatgggtacgttcactgatcccgtccatatcaccaagtaccgactgcgcttccaggaccatttccgcagatgcatgccagtcatgtcggaaattacccatttcatcgaagcgttgattatcacattcctgcaccagccgtgcgagacgaatcagaaatactccagtgcggggagtgaaccccgtgaagcaatcgacaccgaactcgtcgtgaccgtcgggcgcggagcaggctgttaagatggagtggtatatcattagtggaggacctgcttggcgacacgacaaagaacccatcgtgtcgaggtagcccagccagcgggcgaagaaggccccaatcctgttaccaggctgcgccatgctctcgctccgtgcaaggaatagatcgcgagcaagtttcaggtggctcttccacgtgattggcacttcaaatgtccctggagaaacgatcttcaatgacaacagcataatggctgtggccaagtggctgtcagtgatgtcttcattgggtgactccaatgccatacgcaaggctgggaaaaccttgctaacccaatgagcgattcgattggcgggctctggatggcctaggtatctggcacgatgactagcggagtaggcaagcagcaagttgaggagattggaatcaccgattgccactgtttggttagccgtgtgaaagataatataacatagagcagtaaaactcacttgatggcaaaaccgagataaatggattattatcgcagttatgcgggacaagcatgcgagcagtgtggttcaggaaatgatggaagtacatcaaattgatagggttctccagcagcgacgacgggagcggagacaagtacctggggacattgatgggtactggagaagcatagtaaccgctacaaaactggacctgtggttcggggctgggttgagaggctttcgactgtgagggttcctcgttacgccatcgagaactgatcaaatccaacgcatagttgacgtctatggcagcatggtcgttgttgaaagtaagatcctgatcagggcgcccagagtccaatccataattgtcggttacactgttcagatatgtttgccatttgtttcgggccattgaagactcgtgtgatgtttgatcagcttcatgattgctctctcccaatgcctgatgatcgggagtcaatttattctgatgttcatgtatagagcccatgttgccgattgtctcgtgcagcctcggagacgaggttgcatcattttcagcaatcgacggtctgtgctgatcgaaaaccatggaggacaggccgccaatatcgtgtgggctgtttgaggatccgtcttgccctgtcccaggctcggcggtaagttgcatgtcctggtcatcatgcgactctcgagaaaggtgtctttcatcacgggggtgggagatagatggacccgagcagtgatcggaagcgaccacggggtggcgcatatatgagattggttgcgacacggggtgtgtatggaacgcaaaggcagagagtgatccaatgccggacgcctgatccatcgaacccagatatgggttatcaaaactctgctgtccaaattgatattgtaacaaaggcgctgaggatactgatgtcgtcaatggaggagattgttccgcccaagttgaggagaaccgaggctctaattggcccggcgatgtaactccttcagactctgaaccgagcctgggggattcgaaaaggcccactgctgcgggtgtacttggagatattgctcccggcgaagtcaacctcccagggtgagtgttgatgaatccatccgtagggttgttgcttggtggagtggagaacgaaaccgggctcagatcgttgatagcgaatgagtcaggaaatccaattacagctccatacccactagattgtgaattcggcgagtcaattgacatgcgtttcgttctacctccccagttcagacggacactatagtcgcaagggtcgccttgtcgctggcaattaagacatgctggtttctcctcgccactacataattaatcattagctacacgggtataatgcagggatcgtgcttctcaccattttaccttgcgtgctttgcatggcctagtgcaactgttagccttggcaaagcttgggttgtcatcttgataacgtaccaacatcctttacggcttcggcgttttggttccggtgcaccaggtcttctaggacgaggcattgcacgtcaaagggtgtctggtcgagtaccgatgcctgtaaagaggacacggcaacaattcaagataacagaggctcgaaatagccaaaagtcactatgtgctattccgccgccatacactttcagtcttttcaaagtccgtattagtccaatcgagactccttacgcggaaagcacgtcacagttggcacgctttctgcgttttgatcctggttgaccccaagtagcgataaagcgataatcgaccagacacccacacctagtatacaagcacatcgaggtatgggagggagatgtgccagaaacagttcgagtcccactgcccttcagcaatgggaaggcaagagaagccaatattaaccagggtagtgtcggaccttgccgatttcggatatgaaacaagatgtcaaacagaatatgtttccgttcagtacaaacaattgacacactgagtagccggctcgcctcactatgtagctaaggagcacaggttcacaacgaaagtcacaaagacacaaagacggttgccttcagagcgtagaccaaaatgtggggaagcacatggccagccgagataaggaacgatgaatcagccggattgtattataatccgataccccggaccggcataccgcggcaagccggaagtttccgcggaaacccgacaagttccgcctgtcacgtggtcgtaccttgaaccaacgttccagttccctggatgcacattggttccttgagttgcgctttggtagcatattcggaggagtttttttctaaactacatattagctagaccaggactttaggacgctcgtgtcctgacttgtttcccgatatggccagacctctcgccgataaacacccgcttcagcggatgccgagcccttcacggggcttgtcagccttggttcatgtaagtattgtcctttcacttatcatttttgttcagcactgacggattgttttccagttggccggactttcgagctttttgtggtcattcaaatagtatgggtcctctaccaaactagactttgagagcttgctgacattcttgaagcatgcacgaaaatcctaaccatgcgtgagcgcccgtctaatttcgatgttggaaacagcgctaaactttatatttgacagtaatcaggcatatggctggcattttcaatacctgaccgtgattggcctgtcgttgtcaacactcacttttgcggttgcactactagcggatgttacctcgtcccggcgactgttcctggtcaaaaacatcctgtcaacatgcagtgccccccttgaggtcgtgatcagtgttttgtactggggtcttcgcttggtaagtaatttgatgctaaattgacacatttacctaacccaagtacagattgatgagcgtttggtggttcccgaagatctcgttatccccatgcatgccggtatgtctgtaaaaggtacattttaagatacccctactaacacagtcgcagacatcagcttccacgcaacgccgtcggtggtgatgttgattgacctgctgctcctatccccaccatggacgatcactgtacttcctgcattcgggctgtcaggtactattgccttcggctactggttctggatcgagcaatgcttctcgcaaaacggatggttcgtacatgattcagcgcctttgacgccactcgctaattagtttaggtacccatatcctatcttcgaagcactgcccacatcaggtcgtgttggcctatttactctaagtgccgttgtcatggcactaagcaccgttactctcaagtggctccatggacgcgtcaatggatttggtagccccatgaagccggaatcccgcccaggtgatatcaagcgaaagaacggtctgtaaacagatggaccgggatgatcgcaacaatacaccttgctcgggatcaattggcctttgtgtcctttgcatgtggaatgtgtgttcgatcttgaagtagctacaagaaggaaaaatgggcttactgcattgatcataagcgttttgcttgtcgtcccttttccggggtacatctatcattactatgtacatttacatctcacaatatcgcaaatacaaactacgactatgacaccatcgagagccaacttaaaccatagtccaataagaaaatagttacgggcattccaaaaacttctcaacatgatacataagcacgctgccaagagttccagtgcgtggggtatgttcggcgcagcgctaatcaattagtcttttatgccagcgctattgcaaaccatggtatactggattgccccgaattacagtagcaggttactggtgcgctgctgacgcaacttagcacagaaaaatcaagactcttcgaatgtgtgcgatgatcacccccacgcggggtcatcaaagccgtgcgcaccttaactgcggggcttagcgcgactgaaacaagtaccggcccgggattcttcgaacccgcttacaatgttttatgactgcgcgttgattggcacgaattcttcgggcctacggagcaaccgaccactaacgagaccaatgccgagacaatcctttcactatgccgagtcagtactccaatcaacacatgaggagaaggcccattatcctaagtggatccaagaagatacacggtcaatggctggacaccttgaggcgttaaccgcaccacattcgcctagcttcggaccagacgatcaaccattataacgtcggccgacaccacctattttgctctcggccgagtgcacatagtggacaacttgaagttaagcaaaaccgaggtcactcgtgttaatctaaactagcgggccgtggacttggcgaataccttattgtaggtacatgatgcgattcatgcgggaaagcttggcttggtggagcccggggtaccccggatggagcccgtcgacggcctcagataattttccccggatgcccaggctcggctgcaatatcacaggaaactaaactccggacttcgaaactcaacgtcaacctaaatcaactgccgttcaatgattttggcttgtttctttctgttcgaaccttccagtagacgatctcatgccgatcatgcctcaaatcattcaaatctatgccgatcaacctggggccccaacattaagattcaagctaatgccccaattcctgcacgcgggcgaagacacgggccagcgtgtagccgtcataccatcatgcagctggaccctgtaaatctcgcactatccgcccaatgaagtcgtcggtgtttttacccctccttacatagtgctcggtggctttatttctctgctttggcctttcccttgttgttcttaagtagctcgcaggtcgacgcaaagcagctgcacatttcggaacattccccctgccgatctgctcttgcataatggttgactccttcgagaaacgaactgaatcccgctcttctgaccccgagaagattctcgattccaaggatccgctcgctgcagctggatttgaggaccccgatgcaggattgagtgacgaggaaaaggcagaaattgtgtgttaccactcaatgcgtttaatatcactcgaagtcacagtaactaaccacagcacaaacaccataggatcgcaggctactgtggaaactcgatctccgtctcgtgccatggctcagtctactttatctcgtgtcgttccttgatcggtaagccaaaagaacagccgtggagttgtctgagttgtctcccgaggaatatcaactaatctcgcctgtctaggacgaacatcggcaacgcaaagatcgtcggtcttcaaacggacctgaacatgaccaatgcccagtacaatgcatgcctgactatcttcttcgtctcgtactcggtcttcgagcccgcgactaacatcctgctcaagcgcttgcggccgagcatctttatcccacttattatgatggcatgggtatgtaaaacattcccttcctctcagctatcttttctaattgattccagggaatttgcatgacctgcatgggcttcgtaaaaaattacaacggactaatggccgtccggtggttcctaggcctaaccgaagccggtctcttccccggcgtgggctatttcctctcatgctggtacaagcgctcagaattcggcgtacgaatggcgattttcttctccgcggccgcgctcgcaggttccttcggtgggctgctcgcggcagcgattgcgaagatggacggtatcgggaacatgaggggctgggcatggatttttattctggaaggtcttctcacgttcctcattggtgttgcgtcgttctggtgcgtttatgacttccccgaccaggcgcggttcttgtcggatatcgatcgcaagcgcgttcttagacgactcgctatggatcagcagtccagtgctgagcatgaggagtttaagatggagtatttctggtcgagtttgaaggattggaagacttatactggggctgtgatttatatgggtgcttgtgggtcgctttatgcgttttcgcttttcgtgcctactattatcagtgaactagtgagttgtgcacatcgctgcgttggagcttgtggagctaacattgtttttctcagggtaaatattgaaccctggtggttgtgttcggtgttatcgcggctgtttactaactagttgcttctacaggctacagctcgattcgtgctcagttgctgagcgtaccgccatatgccgctgccgccgtcttgacggtggcggttggcttcattgcagaccgtacaagacagcgtggtctatgcaatatcgccgtctccttccttggcatggtaggatttgctatgctactaggctgtaaatctgccggcgcccgctacgcaggatgcttcctcggggccatgggcatttacccagccatttcgaacacgatttcatggacaagtaacaacaccgaaggtaattttcgcccttcttgtcttgtatgtatgaccacggccaagactaaccctattcctgtctaggtgtttacaaacgaggtgtctccctcgggtttatcatcggctggggaaatctcaatggcattgtcgcatccaacatctaccgcgatgatgataagccaaaatactaccccggccacggagtagttctcagctacctggttttgttcctctttggtggatccgtggtgcagtacctcctgctgcgacgtgagaatgccaagcgcagacgcggtgaacgcgaccactggatcgaaggcttggagcatagccagatcgagttgttgggtgacaaaagaccggatttcatttacacgctgtgagtagcggtgggatagccggatgggcgtggaagggagcggagccagatcgagatatgagtgggaatatatgaacgtacatcatcaatcgtgatctcagtagacgattacaggtttatgtacggcgtctatcaagatctgctcgtagcctcgtgcgagacgtgtcgcaattgcaggatacttcaaataccatctgatgccttctcataccgattaacgatatcctgtcccttcttcgggccacgcacaacgtgtcgactagaccagctcagtacctccccagtatcaggctcaatgcggaacgcatatgccgtgcgatacatatcattgatacagaggtggttacccctggcattgaggacggtagtctttgcgtcattgccagaggtcgagacagcaggcggcacaggcggcgcgacgtattctccaggatccttctgcgcagatgtggactccgattctcccgagcccgaatcgaagtcgaagtcgtggaatagatagtctgcttcttccgggcctggcgcgaccttcacgaaccagacgctgacacgtccgccgtcgctgcccaggcgccagatgtacttctttgtccagcgtagacctggtggtaaggcgcctgtgccgacattgctaggtatttcgccttcttcgcagtacagccagtcgcggtcggttgtggtggtggggggttgggcggtgaaggttgcggttccgcggagctcgccgtttaggtcgagggggttgtcgcttcggagggttcgggttaaggaccagcgagtgttggtgagggaagttattagggttgagaggagttggcgggagggcatttttggcattgttggtataaggagggttgttggagaagggaaggaatgcggggaggaataataggagttgttatccaatcatctctggacattccaagactcctggactagatttctatgttatatcgcttgtattttcttatttggcctgtttacctattctatacatatttacaatctatttacacgtaagattgtcgatacatacctaggtatacaaatagggtagatcatcctgggtatcaacaccccggcatgacctataacggacatacaatttccttttggcttctgtggcttggaacttcaccatattcgacttaatttgttagccatgtggctaacatctctgctgtatcacatgctcatacacaatgacatacctaggtatttggtatgttctatatcgggttctatgtctcagggcggatctataatataagacacgccttttttagcgacctggtcgcaacatcggaccaatcggcataaaattgaatccggggtcaagggtgtttacagaataagaggtcactgaatttacgtagtaaagaatgggggctatatgtacaacatatgtataacagcctctcctctctacatgaggtaataatataatatcaagaaagggttgtgtatgttgtactccgtactcggtacaaggatgtctataaatcttacaatctccacttaacaaagacgttgaaacggcttcatcgcctccaaccgtctcgactgccgatcgtggtggacccttgtttaatgaaggactgggatgggttacaggttgaatcctacatattagaatataactctataactcagtccccagatcgtatatcgtacatcgtacatgcacggagtacaatatacatccatagatgtaactccttgcatgggaaaaggatgatcttcagccaaggcgataatcccttaaaaacgtgggccttggtcaatcatttctgcatccagcgatgtaacgagatgaaaagttggtcttgaggcttggaatttaggaaatcgagatctggcaggtgtcaaaatgctggaatgttgagatttccacgtcgatccgcttgcggagattaaaaaggcgctcagtgctacagtcaggtacagtactactgggcagtactacgttgtaacgttctaaggtaaattaaaagaaattaaaatcgaatagtcgaatcaaatatgttgtagttgattactttatagggcaaaaagaaataaaaaagacgaaaagctgaatccggaatcgttcggccccgactagacccaaaaccatcttcgcctcgtttctggtcttttggacttgctcttctttcattcattgacctatgcaagtatggactgagagatctcattcagacatcaaatcgagccccaggcacggctctcacttgcccgacgttcgctaaccaccctcattacaacaaaacatccaatctcaccatgtcactcactacgcgcctcccattcctcttcctcgtccttatcgccctcacaatctcagccctagccgccgacagcatcctccccacatctgcctccagtaaattcccgcaatgcggtctgacctgcaccgccctgacaggcgcgcagacttcctgcgaatcaggcgaggcctcaacctggacctcgtgcttctgccagtcatccctgctcaccggcctcaaatcgtccggtagcgtctgctcctcctgcagcgccgccgaccaagccaccctctcaacctggtacaataactactgcaactccggcggcaaggatacatccgacaccgacacagacaccgacaccacaacaaccgcgtcctcagccgacgcagcctctacatctgattccagcgccagcgcaaactcgaataattccgccgctgccgcagaggagaaggagtcatggtacgtttgatccgaacaccggaaatcaaacccgcaacatccgcatcaataatcaagtaccatctaatcgctaacaaactccccaaataggtggagttcccactaccgctgggtcatcatgctcatcgtgctggtcattggattcagcatcattgccgtagtgggcgtatggcttaagcgtcgccacgacgctaaacgcccaaatttctacaatggcggtagcagcggcttgctgagcacggcttctccgcccgctccgcccgctccgcgcgatgccgcctggggcgcgccgcccctccctgtccagactaccggcctcggtactgactccctggctagtagctcgcgctctacaatggcgaagacgagcacccctgtccccggggctcggacgcgattgacgaagatcgagcagggctctggggatgtggagattcggcaggtttagagcttgttttgggttgggtttcttatgtttcctttttacatgtttgcaaaatgtgctagttctataccatactaccctgctatggttgcatttgttggtgtttggtacggataatgggcttcatgctgtgtctttcttcttgttggtttttggtctctcgtttcaggggtttctttcctttcttttcctttccttgttctgtcgggcttttggcctgggatatggcgagtggatttatgctgacgactgcgtcgattctcttttacggtcatattcgccatctttctttttctttttcttttcttttttaaaaagctgtctgatcaagtgacagagtacatagtacaacgcatgcgagcattccatgattctttatagtacacatattttgtaacacatcgtctagaacccccagggatgtacatcacgagacgctaatactaacaatcttaatatcaacttccggtttctccttgtgcgtccgcacattctcaatcttatgcacaatatccaagccctgcaccgcacgcccaaaaatagtatgcttattatccagccacggcgtcttctctgtggtaatgaagaactgactagcattcgtattgggtcccgcgttggccatcgacagggtatacggtttatcgtgcttgagaacggagaactcgtcggcgaattccccgccccagatggactcgccaccagtcccgtcgccttgcgggtcaccaccttgaatcatgaatttgcggattacacggtggaagatcgtgttattgtaatacccattccgggcgtgtgtgacgaagttctccaccgcctttggcgcagccgagggatacaggcggaggtggatatcgccaaaggtcgtgtgcaggattgcggcagtgccggtctcagcggctttggtagctgtcgtacccgtgcctgccgctgcctgcgttggcttctcgttttggacatcgcgggtggatttcgagatgtctgtttcgttcgtgaacatgtagaagcgcaccttggcgaagccggtagagaggaggattgggtcgcgttcttcggcttcctgcaagagcgggttgctacttgctgccattgagacggttacgacgcctttgcgttgcggttgtccttggtacaagccaaggttgacggatcggaatggctcgtctcggccgtagatgcggactacccggtttgtgtaggtgttaacacatttcacgccgtaaagagagccgtagaggagaaagtggcccgattcgtcgaaacaaacgtttactttgttgcgtgtggcttcgttttcgagttcgcgctcaacacttaggcggcgcccgaactctacttcgtcaagctcgtatggtgctgttccggcttgctgcatctccgtgatggtggttattgattcgtcgtatgtgcggtaaagcttcccggttgcgaagtcgaatactcggatttgtcggtctgggaaggaaaccgttgcgaagtgttcgccggacggggagattgtgatggctgtcgggacggatttggctttcttaaatgcgaagaggtttgttgaggatttgagctcgaagacattgttgggtttctcgaaagagccgtctccagctctccagtactcgatcattcctgattcgtcggcggagacgacgcagtcgaaggcgttgttgaatgctagtgagaccacggggctgcggtggatcgacttcaaagtgtgcaatggctggggattttcgccacgtccgtcaaatacctgaatcgtattactcgactcgtccgtcgcggccagcagaggcagtgaggcgccgcgcgggtgtacccagcaaacacatcgaggcacgaagtccagcgtatacatcgccaagagatctattaatgttagtaagtgctgaactacacgagccacatattatgagcctaccaaatgtgataacatcaaatatcttcagcgtcttgtccagtcccgctgtcgcgaaactgcggccgtcggcgctgacagttacgccccgaatctcgcctgggtgagcacggaattccttcacgaactcgatgccttccgccatcttcttccagaacttgacaaatccatcgacggaggaagtgatcacaaagtctgtgtagggtgcaacagtcacaaatgacaattggtccttgtgcataagggacttggagtaccgcgcggagactggtagcgcattgatgtagactttctcaaaaggaagcttgcgacgcttcttcttaggggcaacctctgacggcaatgccggtccgaaatcatcgtcggaggaatcatcacctagcaatcgcagagagtcagtatctattacgttccgttcgagggagcggtctgggcggtatccatgatgcaggggactcactgttctcggcctcgacagcagagtgacgccgcttgctcactggagcctgagcgagttcaccggagtcagccattgtggatattgacaggaacagggtcaattccagcgaaagggatcgtcacgactaaaaggaaacgtcgagacacatcgcgggcggtgatgaagtgcagccaatcacaagctcggaccaatcgtgcggcaacttttctcctttcccaccccactgttgacaggagaagttgattcaacctttccagcaagacatttgatctttggtcgattgccttattcagctggttatcatggtatgctattcccaagtcgacccccaagggcgtggaaaatatgtgtgtgcactggctcatctctacccctcctaggcatctttcggcaatcccacacagatctttggtgacgatgtcactgaagagaagggcgagaatgcccgtctctccgcctttgtcggtgctatcgccgtcggagacctcgttaagagtacccttggccccaagggaatggacaagatcctacaatctgcgtacgtggggagttatcgataatcctatgtgctgatatgaccccgggaatactgacatgcttgctcttgcagatcaacgggagagatcctggtgacgaacgacggtgctacgattcttaagtccatcgctttggataacgctgcggctaaggttttggtcaacatctccaaggttcaggacgatgaggtgggtgatggaaccacatcggtcaccgttttggccgccgagctgctacgtgaggccgaacagcttgtcgccaagaagattcacccccagactatcatcgagggtttccggatagctagcaaggctgccctcaccgctcttgaggctacggcggtcgaccgcagccaggaccctgaggctttccgcaaggacttgcacgctattgcccgcacaacactcagctcgaaagttttgtcgcaagaccgggaccaatttgccaagttagcttgcgaggccgttctgcgtctcaagggatccaccgacctttctcacatccaggttatcaagaaggccggtggaaagctgagcgattcatacctcgatgagggtttcattatggacaagaaggtcggcgtcaaccagcccaagcggttggagaacgccaagatcctggttgccaacacagccatggacacagataaggtcaagattttcggtgcacgagtcaaggtcgagtcgaccggcaagcttgctgagttggagaaggcagagcgtgagaagatgcgccaaaaggtcgagcgtatcaaggctcacggtattaactgcttcgtcaaccgtcagctcatctacaactggcccgagcagctgttcactgaggctggtatcatgtccatcgaacacgccgatttcgacggcatcgagcgcctggccctcgttactggcggtgagatcgcctccaccttcgagcaccccgaccaggtcaagctgggtgggtgtgatctgatcgaggaagtgatcattggcgaggacaccctgatcaagttctccggtgtggccgctggtcaggcctgcaccattgtgctgcgcggtgccaccgagcagctcctcgatgaggccgagcgttccctccacgatgctctggccgtcctctctcagactgtcaaggatccccgtgtgacacttggcggtggctccgccgagatggtgatgtccaaggccgtggagcaggccgctcagaacacgaccggcaagaagcagcttgctgtcgacgcgttctctcgcgctttgaagcagttgcctaccatcctcgccgacaacgccggtctggactccagcgatctggtgactcgcctgcgctcggccatcaacaacggtatgaccagctccggtcttgacctgttgacgcccggtggtggtattgcggatatgcgtgagcttggtgtggtggaggcttataagttgaagagggcggtggtttcttctgcttcagaggcagccgaggtatgtatttcactgttttttattctcgatgttcaatttgggaacatacgctgactttcttttagcttctcctgcgggtggacaacatcatccgtgcggctccccgccaacgcaaccggatgtaatggacacgattgtgatgacatggatgaattcatctctgtactctttctatgaagggactaaaaatgtgcaatagaagttcaactaagtacatgatctatccatctagcctttcgtgtagtctaccgagtagatataccgtgcagtatgagctacgccctgtggcatcggtcaccccagatatggcctatagcctcgaagtcattgtatagtcctccctctcccatgagtcatgcccaggtaaatgtactgtgtgcacatagtcttcttcttctgggttagaccctcaggcaaaaggatcggatgccgagaccggctgctttagaccgtataactcaccgacataactcgcatagcagaacttgactctgtgaatgcatttgccggtttttccaatcatgtacctgaacgtaatagggattccgcaacatatgtttaacacaaagccaagtgggagagtccttgatacctgaaggatcaggcaccaatttgtccaaaagcggaagacttaaagcggtcgctgtctgagtttgaaaagcttagcgtagccaaggccagggccaaggcagcaccatagatgtatgcgagggatgtagtttttgattgatattctgtcttacagtaatccattctcgtccatcgaagcagatgtaccatccgctaatactcgtacttcataagttcttagaatttgacaggacgatcacattcccagcccgtggatcataagtgggcaacagaccagatcggcattgtctggacaatttatgctgtactttgcaggtatcttcgataaagtcatactaagaccgatgcaattatcaaggggtgtctcagcgttaagcccagtgtttcatttcccttctgcagggctggatttgccgccaggaactgagtctaaccgtcatcgttttatttttaggggcagtagaccaataattcagcaatagtcctatactcccccattgtaaaaggggaagaacaatatgtagactcaatattacaggaaatacagaatagtagtactaagaacgttaatgcggtgaaatagcccaacattcttagacggagacagcccactgtaccagggactgtaacccccccggtactgttgccggttacccccagaccccgtcatcttttcttaacctttttacttttctccccaaacttctattcctgcaatccaactccccttatgccgctggcccttacgctcgtttgagattccacacatgattttgtccaagtggctggccactctgctgggcggcgcgttcgccgtccagggtgctctcgctatcgagttgaacatcgacgatgagagtacgtccccctcacctttgatcgcatccattgtctaattcagtgcgtctctcagattccctcaaaagcgcggccaaaacggtcgccaccaccatgatggaatactacgacgctcgcgagtccaaagacatccccggtaaattcgatggcacttggtgggagggcggttccatgttcatgacccttattctgtactggtacgtcaccggtgatagccagttcaacgacgccattcaggaaggaatgtacttccagaagggcgacgacaatttcttccccagcaactacagtcagtacctaggcaacgacgatcaagtcttttggggtctcgctgctatcaccgccgcggaattcaacttccccgaacgagagggtgaaccctcctgggtatccctcgcacagggagtcttcaacacccagtacccccgctgggacacgagcagctgccacggtggtatgcgctggcagatttggccgtaccaggacggatacctcacgaagaacgcgatttcaaacggaggactcttacaactttcggcccgtctcgccctctacaccggaaataagacatatgcagactgggccgagcgcatttgggattggagcgctacgaccccgctgctcaagcagaagaactggaacattgccgataccacgacttgcggcacgcagtgcacggatcacggcgatttccagtggacctacaactatgccacctatatcagtggcgctgcttacatgcacaactatgtatgttcttctgctatgctgcgcagcgatcgatactaacctcggactagactaatggcactgaaacgaaatggaaggaaggtgttgagggtctcatcaagacctcccaacagttctacccgaccaccggattcaatggagctggcggccaaattctatcggatatcacctgcgaaggcagcggtaattgcgaccggaaccagattaccttcaaggcctatttcaccaactggcttggaatgctgactaccatcgtccccggcacttatgacctgatctaccctcagctgaaaacctcggcccaggctgctgcaaagcaatgctcgggtggtgatgatggcaagcattgtggtattcgctggtacaagcaagcctcttgggacgggaccaaaggtctggagcaacagatggctgtactgggtgtcctggccgccaatctgattcccttctcgggcaaggcgccattgactgcatcatcgggtggaacctccaagagcaacccgaacgctggcaccaattcctcggacagtaatgtccccatattgaacagcatcggtaccggtgaccgtgcaggtgcaggcatcttgaccgtcatcttcgtcagcggctgggctgttgccgtgacctggatgatccgcggcggttaaggtcatcttccgtttaatatctacctcttatctttctttggatcatacatgatccccctttttcttttgttctatattccctttctctccacatgcttctgtggccacatccttctacacctgtatctattttgctttttcttttccctttctctctctttttccccctccccttcactagcacttccgtgcactgcacaaggacggggttgcggcgttcgatgtgctgttttgatctacatagtttgttgtaaaagagccttggtgataatggattgattctttcttcatgtgcccttataaaagtagtgtgttgtctcgcccttgattggtcttcaccccgacgccagggtgcctgacccaccggaaaatgctggggatcaatcttcgtacggagtacggagtaatcgttcgaaggtccacagtagaggactcgttcaaaatgatcaatccaccttaccagagaacacacgtccgaggatgactatgactgtatataaaattgacaaagcatataacatacatatgcagtttcataaggtgtctattaacgaatgtccgagagtatccatatattaagggggataagggataagacactctcgaaggttctccagggcttattgttctaggctatgctggattcagtgtagatcgaaggcgtgcgtggctaaagtacccgtacctcgctgttacagccgtggaggcgggaaaagactcgtcacagcctgtaatgtacacgtgtaatacacacaatctctctgcctacaacaattgtgctcatctcctttcatctcaatgtttctgccatcctgtcattctcatcatctcttgattgtgcattcattattagactgaatttcccaccgtttttcatttccagcatttgtgggttgggggatgatccgctacccggattctcaactcgctccacaatatcttctccgtttcaacatcggcccatgagacgccctccgctacctccttcgttccctcgattgttcacctacgactcaaccttcgtgctgacagctccacaatgcggtggcggctgccgggcgtccattcgacactccccgccagtgtcgcactcctccttctcccaactctggtcgctccgctgcagcaatcagaagcccatgactctatttctcgtgtctccgtgccactagcacaggagtcatcaaataatgcggccccagtggccgcaccacccatcgtgaaacccaacgatgcgagcgcccttgctactctggctctggcaggctccggccgtgccgttcgagcccctcctgtccaagccagcagcacctctgcgggcttggcttcgcagcttcacgcgcggtccttgcaggactgggaggttgaggattttgtgctgctggcgaccgtcgatggaacaattcacgcccgtgatcgcaagaccggggctgctcgttgggccctggaggtcccgagcagtcctctggttgagagtatctaccaccgagcgaatcgttccagttttgacgatacagcccccgaagacgactttttgtggattgtcgaaccgagccaagatggcagcctttatatctacagccccgccccagacgccggcttgcaaaagctcggcttaaccgtgaagcagctcgtcgatgaaaccccgtattccggtaccgagcccgccgtgacctataccgcccgaaaagaaactacattgtacaccattgacgcccgaactggcagcattttgagggtgttcagttcccgtggtccaattaccgctgcgcctgaatgtcggaaggtgaatggagaagacctggaccccgatgagtgtgaatcgacgtctggcactttggttcttggtcgggttgaatatgccgtcgccatacaaaacactgagacgggagatccaatttgcaccttgaagtactccgagtgggcaccgaacaaccgtgatatggacctgcagagtcagtactataggacaatggatgaaagccacatttacagtatgcatgatggcgttgtgctgggattcgatcactcgcgcatggatcggcctcgctatacccagcgcttttcatctcctgtggcgagagtctttgatgtggttcgtcccgccaacagagacggaccaggtgtctcgacccccctggtcctgctctcacaacctcttcagccaccggatccggattatggatctcttgacgatgaaagagatatgcgtgtattcatcgattgcaccgaggcagggggctggtatgccttttcagaggaaacctatcccctggctacaggccgtgctcccatggctcaatgctatgacaaagacttcttccgccatgggcaagcactgatgagtctgagtgcgcgtcaacagcggaatgcgttagccggtgttcactctctcactggccctcgtaccatccgtccacatattcctagaatcgctgggtcgtccacttctgaactctccaatgacacaccacgagatattattcgcagtccttctgagctggctttgcctcccgccttacgaaatagcgccatcattcgcaagagctgggacaatgctttggatatcgtcgtgacgttgattttactgttcatctgcaccttcatttacttcaactcgcatcaccttcgagatctggccaagcagaaattggacatcaagaacatcatcaactccaatgataagccttctctctcgaccccttccactcccgtcgtcggtgctccggatatcaaacgatcatctacaccaacccaacaacttcctaatgtcactgtgaacttagatttggatgatacatcaccagagggaggatcaaccccccgtgcctcgcaagacactccaaattctaccccgcgggtgcaaattcgtgaaccgtcacgtgggcctgatgacgaggacgccgatgaacctggaaagccaaagaaaaagcctcgcgctcgtggatctcgaggagggaagtcacaccgccgccgtaagaagcctggtagtgagggcgatagccccgagggagccgatcagggcgtggagcaggccaataacctgcccccccaggctcgactcgaggccgatacccagatggtccggacggtttcgaacgagattattgagatggatggcgttgttcgcatcggcaggctccaggtcttcactgatgttgtgctgggacatggcagccatggaactgtggtttaccgcggttcgtttgatgggagagacgttgcggtcaagcgtatgttgatggaattctacgacattgcatcccatgaggtggggctattacaggaaagtgatgaccatcataacgtgatccgatacttttgccgtgagcaagccaccgggttcttgtatattggcctcgagctttgtccagcatctcttcaggatgtcattgagcgccctgatagctaccccgagcttgtccagaccggcttagacatgcccgacgtgctacggcagatcacacagggtgtccgttacttgcactctttgaagatcgtccatcgtgatttgaagccgcagaacattctcgtggctatgccgcgtggccgtactgtttcgcgggcattgcgactccttatctcggattttggcctgtgcaagaaactcgaagacaatcaaagctcgttccgggcaaccactgcccacgccgctggaacttccggctggcgtgcccctgagctcctggtggatgatgacggtcctatgtccctcgcatcccagcacacagagtcctcggagcccgctgtggtggacccacagacaaaccgccgcgccaccagggccattgacatcttctcactgggttgtgtgttctactatgtcttgacccgaggcagccacccattcgacaagaatggtaagttcatgcgggaggcaaacatcgtcaagggccaattcgatttggaggaattgaaccgtctgggcgactacgctttcgaggcggatgatctcatccgctccatgttgtctctagaccctcgccagcggtaagaatctctctttgcagaaagccacttgccacttaacttactgacatgaatttctagtcctgacgcaagcgctgtattgatgcacccattcttctggcccccatcagaccgtctcaccttcctctgcgatgtatctgaccacttcgagtttgagccccgcgatcctccctcggacgcactgctttgcctggaatcagtagccaggcgggtaatgggtcctgaaatggatttccttcggtcattgccgcgagacttcaaagacaatcttggcaagcagcgcaagtataccgggtcgcggatgttggatcttttgagggctctccgtaacaagcgcaatcactacaacgatatgcctgaccaccttaaggataatattggcggcctgcccgaagggtacctcaatttctggacatacagattcccgagcttgttgatgagctgccatgcggtcgttgttgagctggacttgactcgcaatgatcgcttccggaggtattttgtgcctccagaatagatttgtgtccgggagatctctagaaattatatatgaacatacttgaacaatttgtcgtgtctgtacactctttagcaatgggcgatatgcatgatgtagtgcgtccgcattgtatggaattgcccaggaacccgtaactttagaatatcagtcaggaagaagatctaaacagcagtatgaatgactcttttcttctaaggttgttctcacttaaattggcctgtagatgtggcagatcagtaagtggatcgcggacgtgactacttcgcgccagttccgcgttctgatttccctccacgtcttttttttttcttcccacccactcaccctgcaccattccacttggtgtttggcaccttgtctctttgagaggtcatgtgtgtttgatgaaaccgtttctcttaaatcttgctccctaccattagttacccctcccctccagctctaccggtttttactagcgactaccgtcgcctcaacttccttcccccacgcgccatcgctccaattaataccatcacctgcatgtatatctactgcctactacattatctgacgcaatggtatttctccgactttcaattaaagtgttcccgcgggagcagctgagctcgagctcgagctccagctggggccggaccttactcggcacgcgaaagactaccaacgatgactccagccaaggatctgcagtctcaacgacattgaagaaacctggtgttttcttgcttgttctggaataccccgaagaggtttcgcttggcggactggcgggcatgatccaggaacattgggccaagctgcacccagagctggagtaagtgttcatatacgtatccgatctgtcgaactccaattgctaacttcgttggttgatagaccccttgcgattaagaaaatcctcgatgatacgaaggaggatctcgatctttatcccgacctgaccgttgctgatgtctgggttgactatggaaaagctcgcaccgatggccttgaccagcgtggctccgttcgcgttattcaaaggcctaccacggctgccccggagcgattcccttctgtcgaccaggattgggatgctgctattgttgcctacgagcgcaagcgtgccatgaaggataaaaaggaggcgatggaggcacagttccctgctatccaggaagaagatgaggacggtagtgtcgaatcgccgcgtactcactctcgatctctgtctcaatctcacatccaatggggactttcgcctgcatcgcctcggcgtaccaataatgactctcatgcctcagctcggtcaccagttgagcaccgccatcgtgatttacctctttcttctgttgaaattcctaatcccgttatcacttccccaccagcgaagtcaatgggccctacaattgctggcacgccgcctcccaggcgcgagagcgaggagctcggagagtctccatcaccagccgagcgacgagcgtccagtgccagatctcaacccacacctacatctgcagctgctgggtcaccggaaccgcagcctaagtcgccaaatctcgcaaagcgacccattgcgaggagtacagctaagcggacaattacccaaatgcctgacgatgctgaatccccacctattccgtctgcgcccaatgcccaccaacagacgcagtccactgaggaggctactgctagctcaagtcacattgaagcagagtctgctccgcggcgtatcgtgaaactaccattcaagcctggcatggctaacggagtcaacggacaaggacatctggcggcagtggctaagagtgtatccaagcctccgcagaaagagcaagcggaaccggttaccggggtctccagtgacgggtccagcgaagaggagagtgaaggggagagcgatattgaggatgataaggttgaagcggagaacaagaacgccgagcaggacaaaagagaagcagaagatcaggctggttctgacgactctgacgactctgacgactctgacgactctgacgactctgacgactctggcgactctgaatctgattccgagtccgacgccagcgaagaaaatggtcccaaggatgagcccatcactcctcgcgttgatcactctgttccgattactgaggatttgattgacccagacggcgatgttcagatggaagagcctgtggtaactaggagctcgaagacctcggatcagtcggatctctcgatctcgaaaaccgacggtacaactcttgaggctcgatctcgcaagcggaagcaggcccccgaagagtccatatcggtcaaagaagctcgccaagggcaggcccatccctcgactcgcccatcgacccctcctcggtctgtgcctgcggttgttctgccctccgagcaggctcgtcagtcgatgttgaagtcgccagctgcccaaacgagcccactacacagacgggcccgtgcgccttctttctcgagcccagctcgacaagccagcgtccgggaggagaacgaagcgcctcctaagcctcatccatttggaattgggctgggcattacacagagccctcctagcaagcagcctgtcaggttggatctgtcgcaagaatctgacgcaacatccacccagaattcttttggcgagtcactttccccaagtagcaacgtgcctgttaccaattcttttacttctgttaataaacagactcctgtgattgacagaacgaaaaagctgcactccgccatccgtggcaaggattctccagcaacggagaggcgatccgtctctttcgccgagggagagagccttgcttctagcttggatgccgccccacgctctactccgcgcaatactgcgattgccaaacctgcccctaccaccaacgctacccaggggacaccttcgagcgcaacctcacaaaaggccacgccgaagaacaagtccgctgtcaaacctaccccaggaacaccctcaacctccacttctaggaaagccacgcctaagacccaggtcaatacccaaacacccaaatctacttcccaacgtacccaggcaccaccatccagtagtgatatgatctacccgcccggctttgatatcgaccagttgactcagcaaattgagaccgaaaagaaggggaaagggcaggctaagacggacgagaaagtacaaaaggaaaaggaaagcgcggagaggacagagatcgagcgcaagcttcgggaaacccatgacaacccccagcttggccttgttttaactgagatgcatactctcttgcagaggttggccaactccaggctcgaaacggccaagcgaaagcagtaccgcgcccggcttgagatcttgcgtgagcacctgaaagcctgtgaacaggggctggaagcgcaaacgcccacatcttggcaagctatggacgagaaagtacaaaaggggaaggaaagcgcggagaggacagagatcgagcgcaagcttcgggaaacccataacaacccccagcttagtctcgttttaactgagatgcataatctcttacagaagttggccaattccaagctcgaaatggccaagcggaagaagcaccgcgcccggcttgacatcttgcgtgaggacctaaaagcctatgaacagaggctggaagcgcaaaagtccacacctcggcaacctgtcgcaaaaaagccaaatatgaccctcaaggacatgctgagcagccaaaagcaggaaatggctgctaagctgcgacctgagcgtaagtctgccccggcaccccgcagtgatgtgtacgaagtgcccagctccggcgaatccgagtctgcgtccgactccagcagtgacgaagatagcgagagtgacagtgaggcgggcgacattatgcctgacggccagtcagtcaaactccccaagccccggcccaactaagatgcacgttttgctttttaagatatccttttttatttgcatgcatacaatgtcttgctttgttagccctgtcaacatcgaaatagccctgtacagtgtttttaccagtgtatgtatgacattggaccaatgctgaaccagaaatgcaattttcatttcaaacgtggatgaacccagttggtatcaaagacacctaactccggaattggaatgctgaacattatatttgtatttctatacaaggtaaagtccacgggtgtatatgttgacctactacctgagccgttgggttgggtctttgggcgatagtaaccggccttaatttccggctcggccatgtgttctggaaacccataggacaaactcaaggggcattaatggaaattatataacttttggccactcggatacgggatgattctatctggcatcatcttgatgttaatttgccattgctccaaacttggcatggcccaatcttccacaattggacggctatacgttgacagcattaactgtcggtcgatcaacccccttgagacccattcgaactgttattttgcgttggtgatcgaccactactcccaaccatgacggccacaatgcccaggtaagtatcgccacggcacagagccagcctcatctaatgcaccgtagcacggcatacacgccgcacccaagcaaaatgatgaaggcagcgcagtggatgggtacacgcaatgtcgaagtaggagtcgtacccaagcctcagatcacagacccgggcgacgtcatcgtccaaataacccactgcacgatctccggctccgacatccacctatacgagggccaactcaaagacgcaatggaaaaaggcgacattctcggccaagaagccatcggcatgatagaagaagtcggcccggatgtcaaatccctcaaagtaggcgaccgggtcatcatcctacccgtcatctcatgcggtacctgccagtattgccaacgacagcagtattcgctctgcgacaacacgaacccatccaaggagatggaagccgcgtatggccaccgactcggcgggaagctgggctacagccggctctgcggcgggtatccaggtaaccaggcggaatactgtcgcgtaccgcatgcggacttatcttgtgtcaaggcgccggagtatatcgatgcgaggaaattactgggtttggcgaatgttgtgactaccgcttggcatgcgctggagttggctgaggtgcaggagggggatgtgttgggtgtttggggttgtgggcctattggtctcgccacgcagcgacttgcgaagatgcgtggggccaagaaggtctttgccatcgataaggatcctcagcgactgcggattgcggaggactttggcatgactcctgttgatgtggatagtcatcccgatgtggctgagtatattctgtcggttcaggaccatggccttgatcggtccattgaggctagcgggtaccgttgcgtggggaaacaggagtatccggctatgcaggcgattggacttgagaaggatagtagtgacacattggcggcgatcatcaaggcaacccgtaagggtgggaatgtggcattggttggggatttcttcttcacgacgcgtgatttcccgattgggccgttgatgcagaaagcgctgacagtccgcgggggtcaaacgtggccccaaagggtaggtcgggttctttttgtttttccttttttggaattgatagcttaccagatgcagtattttccatttttaatggatctggcggtgcaaggtaaaatcgatacgtcatggatgttcacttacgtggacgaattcgagaacatcgcggagatgtacaagaagttttcgctgcatgaggtcccagggaaactgaaagtgtgtttagtgacagcttatggacgcagtcaacagatgcagggctatagcgacttgccagtcacggaggttggagtctgactttgagtcagcatagtcagccaaaaccttatagaagcacagatataaaatccgcgttggctccccgcattgataaatccacacttcatcatgttccccccaccacccattgctctcgattggaataacctgggctttaaagtccgggatggtaagcaattgccctttagtaatcagtagattctcattcatagcaggcaatggccatgtcgaaatccacttctcccacagcggtgagaacaaatggtcagcaccgcaattcgtcgcctcacccttcctaccagtgcacgggatggcgccgggtctgaattatggccagcaagtctacgaaggccttaaagccttccgtcacccatccaatgacaagataaccatcttccggcccgaccgcaacgccaagcgcatgcagtactccgccgaagtagtctcgatgcctcccgttccggaggacctttccatagagtgcgtgcggttggcagttggcgcaaacgccgagtacgtaccaccccacgactccggtgctgcaatgtatgtccgacccatactcttcggctcctcggcgcagctgggactaagtccgccggacgggtacacgctggctgtatttgctatgccgactggcgtgtaccacggagctagcgcggttgaagcgctaatcttggaggacttcgatcgctgtgcgccgcatggaaccggtgctgccaaggttggtggaaattatgcgcctgtgctgcgacacagtgaccgggcgcggcgggaagggtttgggattacccttcatttggatagtgcgactcgcagtgaagtcgatgagttctcgacttctgctttcattggagtaaagcgggatggtgatcaggtcactgtggttcagccggatagccggaatgcaattgactcggttacggcggcgtcggtgctggaaattgcccgcacgctggggtaccgggtggagaagaggcgggttgcatatgaggagctgggcgagtttgatgaggttattgctgctggtacggcggcggcgttggtgcctgtgggtagtattacgatgcggtcccgtggtgataagtttgagtaccgttgcggggctcagaaggagggtggtgatgtttgcgttaagttgctgcaaactcttcgtggcatacaatctgggactgtcgaggatacctttgattggaactatgaggtgcaggcaccaccgaagggatggacacagcaagagcaagaagagattgagctcagtggtgccaatgccccataaacaggaattgctgggatgagttatccaaagggatgccccagatctcggttttgtttgctaaaataaacaaatataagtacctgtggatgggtttccacctcaagccagatatgtcctcttgactgtttcggtgtagctaggtatattggatcaaaaaagacaccaaaaaggtacttgagtaagaaacttaaaaagatatagccggtaaatttacttctggtgctatttcatctttaatatcttcgctgctattacgctctattacctcttcagggtgcggagctcttaaggctaaggtaaatatagcgttgggcctaaggaatcgaagtatgaggtttacccacatacctgtgcggttgatgttgacatggaaagctgttcaatgagcgatttattcgcttcacaggtctcatgcacgcccgctcaagccaccaactaggctattcatggcgttagcctgccgtgcgctttgagggagtaaagcgtcccagacccggcagcccaacctctcaaatggaggaagaaaaacagatatacttcccacaagagcgctaacaaaaagtcaaaaatttatccggcgaagtagctaacgcccgaatatgtcagatttcccagccgctgcataacaccacctggcctggtggcatgaaaaaaattcatgtagaattagatgtcacaataccaaggcgtgtccatagagaaccccctctaaagcgactgtggttgtgatttgttggtacactgtggggttgtagctggggcagataatctggggtagatcatctgccccagaaaggcccgagctgtcatcaccacgtgggaactttgcacaagagcggagattataatactttattaagattccagtattattgtggtaagtagtgaatatagtgaaagaggaatgtagggacttattccccaggccggatgcggtgatgttgtgatatatctttgtttccgtccctaagagaaggcaaaggaatgactttcgatttaatttaatttaattgtttaacttttgaccttcccattttgagattagcgagcccaagccgttggaaggacccatggtactttaaatcttattggccctcgtattagctcaagctgactcccactttcatttccggttatctcagtctccaacatcttgacttgcaaaatcacctttgcctgttccatctgcctaagctgggtactgcacagcatggcgaccgccaacgcgaccactactgctatggccagtagcactaatgtagtcagtccgcagggtggcatcctagaaggcggcaacccaacccattatgactccaagaatccacttgtgttgtttattatccaggtaactatgtcgccatcgcgggaaacaatcatttggctgacaagcaggccgtaataattatcgtgctatgtcgcctgatccactggcccctctcgaagcttcgtcagccccgagtgattgcagaggttatcgggggaatagttctgggcccgtcggtgatgggccgtatccccggatttaccgacgctattttcccggccgccagcattcccagcctcaatgtagtcgccaacctaggcctgattctcttcctcttcttggtcggtgtcgagacagacctccgcttcctcgtcagtaactggcgggtcgctttgagcgtctccgctgcgggcatgatcttgccgttcggcttgggttgcgctatctcctatggcctctatcatgaattccacgatgaccctagtaccaagcccattgccttcggtacctatctgctcttcatcggtattgccatggccatcacggccttccccgtgctgtgtcgtatcctcactgagctgaagctgcttccgacccgagtcggtgttatcgtgctgtccgcaggcgttggcaatgatgtagtgggctggatcctgcttgcactgtgcgtcgctcttgtcaacgcgggtactggcatcacggctctgtacgtgctgctagtttgcgttgcctacatgttattcttgactttcgctttccgcccgctgttccttcgcttcctcgagaaaactggcagtctgcaaaaaggacccagccagtccgtggtcgccctgacattgcttatcgctctggcgtcggccttcttcacccagatcattggtgttcatgccatttttggaggcttcgttatcggcttgatctgtccgcacgaaggcggctttgccatcaagcttactgagaaaattgaggatttggtcgctgtcattttcctgccgctttatttcacactgtctggtctgagcactaatctgggcctccttgactccggaatcgtctggggttatgtgattggcgtaattgcgatcgcgttcattgcgaaagtcgccggaggtgctgttgcatcgcggctttgtggtcttctatggcgtgaaagcttttcaattggtgtgttgatgagttgcaaaggtttggttgaattaattgttttggtacgtctaaccctgcaggaaggtccccgattgaggatgtagctgattcaatcaccacagaacattggcctccaagctaagattttgagcactcgcacatttacaatttttgtcgtgatggccttagtcaccacattcctgaccactccattaactaccctgctgtatcccacatggtaccaggttaaggtcgagcgatggagacgtggggaaattgactgggaaggcaaccctgtccaacgcgatgaccgcaatgacagtgtcgccattgctaaagatcagttgaagaccgtcccagtccgcaaactcctcgtctaccttcgcctcgatggcctttccggagtctgtactgtagcagccctcctcagctcaaagcgacgcgcacccgtgtcatcacgcattcaccctgcgaagatgccaaagcagaccgaggaaactgttgaagatcatattaccccagaagaggacgaagacaataccccacttaaggttcacggtgttaggttaatggaattgacagaccgtgattccagtgtcatgaaggttgctgctgcgggcgagcatgcgctgtgggatccggtggtgaacaccttccgcgcattcggagactggcatgatctctcgctcatggcaggcgtgtccgttgtccctgagcactcttacgcagacactgtcatcggcatggcacagcatgacaccgcagacatgctcctgctcccctggagcgagaccggaacactggccgaccaccataacgggctagagatcgacgacgcaaataggttctctaacggcgcctacacaaactttgtttctgatatcctcgagcgggtcgcaggccatgtcggtatcctgatcgaatacagcccagtgtcaacctcatcaaagcgacctgtgatttcacgcaccgccagcggtatgagcctccagggctcaaccttcgcccgccagcgaactggcagtcactcccaccatattgttcttccattctttggcggtgaggacgaccgcttcgctcttcggatggtcatgcagctcgctcagaatgaccaggtcactgcgactgttatccaaattggtggactgggcagtgatggcagcaaaccaggagtgtccactgcagcacctgcttccagctcgagtgcaccccccgtatcttcctctcagtccgacatggctttcttcgagacaattcgagattcagtgccggaggaaattcaagagcgcgtcgttttccacgaaccagttgcgaacgaaaccatcaccgacacagtccagatggctgttgttgctgtgcgtgaagaacttaataacacatccaacaaggcaaacaacattgtcatcgttggtcgtcgtagtatcccttctgagatcgagctgggactggaggacggcattggccatgatacccgccggactctgggggctgtcggtactgcgatggtactgcccgagagtaagatttacggtagtgtgttggtgctgcaggctggtaccgacaccggcttggctagttactaccgttgattatgatttgaaatatgactggaagtatgtatattttgattgcagtatactcgggagagatataactcgctcatatgaacctttttgaaacagctatattactttctcaagatgtagagattatcaacatatatgtggcgaagtcaaacacgaggatattaacaccatatcaggccaaaagcaaaggcccaaacgccagaccaaaacagggtatcatggatttcgcataacaccagatgaagtagatgtagaatgactggaactcccttcccaaggccacggcagactgaactgccgatgatctcgcattggcgactccaaactcgaaatccgatccctatccgaaggaaacgagccagtctcgttgatctcccgcatgctcgagtgcatatgctggctgtccgtgccaccgcgcgcaaccgcgatcaatttcccaaggatagcatattcaagcttcagcttcacactgtacacgacaggcttgaacaagacctgcacggcatagtagccgacatattcgatgacgacgaccgagatatccagcacaaggatgaggatattaataatcaacaactgattaagaattccctgcgggcgaccttccggcctgagacggagtagcttgaccgtttcccagacgtagatactggaaataatcaattcctgtatacagaaaccgaccagttgtatacgctccatgatatcgtacgcgcgggcccagcgacccgtcggataagcaacagtcccgaacaagacaaccgtagtcgggatgtggaagaccagagcatcgatacagatcatccacagcacaccgcgcagcaacttccgattctgcagcacgagatgcagccgcgaccacagcaccatcgactggccggtgatcatgccgtaccagcccagcacgacaagggtcacgcatagccagggagtaacgccagtcgggaagaagagaaggacgaatccgagacaatacgggatgatgcagccggaggcgacgagcagactgcagaagtaggtgccgcgccagcgtctgaaggagaacaagcataggatgacgagctcgatggcgttgtaccaggctagcgacgcgaaggcggcgaaaacacctgtgcgagttaggtcggatgggccgtagttggcgagggactctgcaacgctgatggcgttatcggtggccattgtcgatggagggacattgctggttgttccctggggtatggagtagatggataagggatagagatatagggggaattgaagatcgggagaagctggggagggatgaaagaaatacacgagctgaataaagtttgttcaagctgcgcatttggccagtggtggggatgagcttaagaggccatcgggggcaaatgaagggaatcgactggaagaccgtaccagcgcacctgatacctcggattccatgacagctccttggggttgtggggaaaacgggcgaaagcatgactggacgagacagacatggggaagtcctcgaaccatggatcccagttcgggcgagatttagaatttttcgtaacctacggagaactccgtagatgtcaaaaagggttttccttcactacagttgtattctcctcaatattgggtcgtggcttgactcctgttttgggttgtcgatcccccttgcttggacgctttggtgcttgagaaacatactatcccagagagataggacgggtagtttaatagggtgggcatccatgaaggaagacatggaatatgacgtatcggcatgagaagtgtgaaatataagccatgatatgttgaattgcacgtctttacagtgaaaacccgttgatgtcagaacacgaggttgcttgcatctggtgcgtgattggttaataggagaacgctatgttgtagatctgccatactttgtgcggagtaggccgagcttggctattggcaagacacggggagtcactgacataacttatttcgctagcatacctaggtataacaaggataacagggataacagggataacaggaatacatttctggcatggaatagcaggaaatacatggacagggacagatcgcgaccagatcgggctctgacgtcacccgatctgatctgaaatcgatctcgatctctagatcgaatgacgttggattcctttttaaacagcgcttttcctatgattcccagtaatagcagaatctttttttctgctgctatcgatcggtcgtgcacctgtttccttcaagctaaatcgcaagcccagctcgtttgcaagtcatcagctatgccaccaaagaggaaggccaccgaaccgccagctggacaccccaatggcttgcacgggagtaaaaagggccatcctgacttgcaccagccgcacccgaatgcgaagcaaaccgagaattttggcatagtcctgcgccaattctatcctccagagatgagcaatgagcgttgccaagcatacaccaatggcgagctggaacgcccaattgaaacactacaaaaagcttgcagggaaactgccgacaagcggcggtcgatcaacgtagggagtgctgtggtacattggttcaagagcgatctacggcttcatgacagcagagcgctgtatgcggcctaccaatttgcgaaagagcaccaagtcccgttgatcggtctttacgtcgtatctcccgaggattggactgcccattcgactagccccgctcgagtggacttcactctgcgcaccctcaagcgactgcaacaagacctaggggaattggatatccccctgtatatggaaacacaggacaaacggaagacgatcccgaaccggattgtggagttgtgtcaacagtggggcgcgaaaagcctatatgcaaatatcgagtatgaggtagacgagctccggcgagaagccaagctcgtaagactctgtgcagataacgatatcaatttcactccctctcatgatacctgcgtggtcacccccggcgcgctggctagtcaacaagggaaacaatattccgtttacactccatggtatcgctcctggctggcatttctaaaagaaaacccggattacctcgaggtctctgaggaaccagggtcaaatcctgggaatgcacgacaacaattcaaggactttttcgattgcaatgtgccagccgcccccaatacccacatcttactagacgaagaacagaaacgcttcgaggggctttacccagccggtgagcatgaagctctccagcggctggacaacttccttgaggagaaagggaaagagtatgaggagacgcggagcatgttgtctggtgaaagtacctcggttttgagtccttactttgcatgcggagcgctcagcgcaaggactgctgtcgcgacagcgaagaggatcaacaaaggccatattgatcgatataaccccggttacatgacctggatcagcgagctggcctggcgcgacttttacaagcatgtcctggtgaactggcctttcatctggtaagtctttatctcccgcacaacggagttcccattttaatgcaaattactcccgtagtatgaacaaatgttttaagcccgaacataccaatattgaatgggagtacgacaaggaccaatttcaagcgtggtgcgatggcaagacaggtttccccatcgtcgatgcagcaatgcgccagctccgccactgcgcgtggatgcacaaccgcacgcgcatggtcgtctcatcgttctttaccaaggacctgatgctcgattggcgccgtggcgagcgctacttcatggagaacctgattgatggtgactttgcatccaatcacggcgggtggggatttgggtctagtactggcgtggatccgcagccctatttccgcatcttcaatcctcttcgccagagtgagcgattcgacccagagggagaatatattcagcactggcttcctgagctccgcgacgtgtctggaaaagccatccacgaaccttacgctaggggagcggcggaaattgcgcagaagaatggctaccccaggcccattgtggaccacgcagagagtcgagatcgagcgttggagaggttcaagaaggcactaaaatgaacgaacatgtaaattaccctacctaggtatgattagtcgcttcatgaccaatatggatcacatgagatgcccacgtgtagtccttgtccaaaattaaaaatttggagaaattccacgccaagtccgaattgcgggtgagacattcttgccttttccccgcaacatccttcattcatctccaggctcttttttttttctttacacttgacctcaatgacgtcccaagatggagctccagggtgacccgctatctccggtccccgacgcggtcgaggttgagctatcaaatggcaagcgacgatggcgccgaaacagagttgcctgcgactcttgccacactcgccgtgtacgatgcgaccgtgcatttccctgctcgagatgcctgcgaggtgatataaactgtcaatttacccgcgagcgccggaaacgaggacgtatcgcgagatccaaacagaaaaatggaaatgcgaatgccggcgatgagacagcccaggaccccaccgaggggacgcaggccgatggggaacacaatcgggagtcgcagtcgcagcaggtgctgtcgccgattgaccaaaattctcctgcatcaaccttccagcagcgatcgccggcaacaaacgagatcagcgccgtgtctgcgcctagtgtcgacgaccctcggtctgtgccggatcctcctcagccgcagcgggcaggccctgctgcaaatgccacggaggaatggctttcagcggcacatctgtcgccagactcgtatgatctgctcgcgggcacggggggcagcgacgcgcctctacctcggttgatggatatttggaatccggttgattttgctggcctccgaccggttcagcgtgcccctcccataccgtctgtgtcgggggcgaatcttccaagacaaaggcagccttcgacctcccgatcgccattgaagtaccctgtgttggaacctctgatgccttttctcgaatcgaacctcccgcgtcgcctggtgtgcgatctgcttgaactttactttaccagtgctttctcaacccatatgcatcccgtgtgccatcacatccactgctacgtcctgcgaaagacttcttttctaagcgtcgaccgccccaggcccactagtcctgccttgctggcaagcatgctctgggtagctgctgtggatgatcgggccttctctttatccatctcaccattacagcggagaaggatatgccaatttctttgcgcgttgatcattcgtttactgcggcctttgatacatgtctcgttcaaagaccaagatccatcacctgccgaaaacccgaccgcccacgacttttccgccggggcccatcacccatttgaaggagtcggtgatgataaagggctggtggggcctgctggatctttagacgatgtcattacttatatccatgtggcatcaattatctcctctagtgagcagaaggctgcgagtatgagatggttcgttgtacccctgttcctatcccctgtccactccactaactccacctaggtggcatgcggcctttacattagctcgcgaacttaaattgaaccaagagatggaaataacacccaacatcgacagcatgagcgatggttcaagtccctccttcggctacggtctaggcggatggcccggttccccaggtgggctgggttttgactattcgaatccctcgcgccctagtctgaattgcgtatgtgacaagaaccatgatttgcacaacggtcctattacggaagaacaccgggaagagcggcgcagaacctggtggctgctatatatcatggaccgccatctcgccttatgctacaatcgtccgctagccctactcgatgctgagagtgaggacctgttgcttccactggatgaaagctcctggcaagcagggatcattcacagcaacagtccccgtccagatgggcctcagtgtccccggtcgggtgaccaaaacaaacgtcggattttcccgaacttcatctgccatgaccactctattcttggattcttcctcccgctcatgacgatcactggcgaacttatcgacctaaaccaggcgcgaaaccaccctactctcggggtcaggcttcaaggaaaagaagcgtgggaggtccacgtctcggaagtgctgcgccagctagaggtctacaaagctagtctcacaaccttcgctgcggcgacagccgcagacccagcggcctcatcgacgactgcctatacccacaagccagaacctgttgacccgcaattgtctcaggcctattcttggcatacacaaaccgtgattgcgtattcctcctacctaacccacgtcctccatatcctgctcgtcggaaagtgggaccctgtctcactgatcgaagacaaggatttctggacatcttccccggcctttgcctcgaccatctcacacgcactggaagccgccgattccgtgcaacaaatcctccgcttcgacccggacgttagtttcatgccttacttcttcggcatccagctgctgcaaggcagtttcctcctgctgcttattgtagagcgcctacaaaaggaagcaggcgagggcatactcaacgcctgcgagaccatgatccgagcgacagaatcgtgcgtggtcactctcaatacggagtatcagcgcagcttccggcaagtcatgcgctctgcggttgcgcaggcgcgagggcgtccggttaacccgagtgaaattcggcaccgccgaaaagcggttctcgcactttaccgctggacgagaaaggggactggcttagcgctgtaaataccccacaatcagctccggctagcattgctctgtccctgtcgatcgctgcgccctaccgggctagaccacgcgtcctgcgggtttgcgtacctgaggggagcggcggaaacccctttccccactggtcgatgatcgatcttgtaatcttagggttggctggatactgcttgtatacgattgcttcctgtatagttctggagcggagcggcgtctcttttttggacatgtggcgtttgactttgtgaaagctgcttttgtatgtaatatcgaaggcggataattctgcaagtatataatctacccctgaggacatctcggtccattcttccatgtggcgtggacaataccttcttcagaaccctatatcaacctggtcataacgtacataatcagtatgaaacaaggccaatgtcattccccgttctcttttaggttcttcatgtgtcgagcctattcaatttacccgttcaacggcggggtctcgattaaattctcagtgccgagcgaccagaattcaccgattggccaacgacctcccccgaatgcatggccttggcttcaaaatccggggaaatcggttaattgacgaatttcatgcgatcatgcggtctccagggatatttgccgttggagcttcggggccccaggttctccgcaactccacagcttctcagctccgtggtttgatgttgaagtcgaaatttttatttaataagtcgagcatggcccccattttgcggggaattattctttgcttttttccttgtgctggtagcaagttcaaggtctacgaagatacaaactatttcaagcttcaacttcagctctaactccaacaagagctttacttattgagttcggctcctatacttgcgccattactatttgagcctgtgataaatacactacattcatcatgaccgaagctcaattcccatacgatattacatcctggcccatggagagtctcgttgatttgcacatgggacaacacgacgagctcagcccgcaccctttcatcgccagcgactttcctctgacaatgcaggagggactagatccctcctgggctggcgagcagtttagctgggtgaacgaatacccgattaaatcgaccgcatttcaaccatatccgcaaatgtggtatgatgccggcctggtgagagaggactgtggagggacgaaaaccgatatcagaaggtaaattactttgcaacctgcgccttttgcccagaaacaccaaaagtgcgagggaaaaaaaaaaaaaagaaaaagaaaagaaagagcgcatccagaacctggctaacacgtgcaaacagtttctccctccaccaatcaccccaatcaacccccttccaaactcccgagaatcccccgatgcactcccgccccgatttcgagctcgcaacacaaagagccctcttcatgactccctcccccaaagccctcgccttcccctaccccggatctccaagttccgatcccaacacatccccagaaccaagccacgcctcatcaagcgtgtgggaaggcgaacccgatcgcgaagacgcccaatacatgcaattcgacttcggcccgtccgatttcggggcctcggcattagacacccaatatcagcctggtcagacccacagtctcagctccccgcaccgtcgacactccggaatcgacgaggagtgtctcacaccactagagatgccggatggcagtactcgcatgacatcaaattggctgcccgtggaccctgatgccggctttgcgattggttctgccaccatggtggatgaggatgttgctgcgttccaggacatgaagcatgcgttcttccctgcggtccccgcggcttggtcgtatgattgatcagagcggtgatgcattattttcgcgttttgcgacgaattcctaaacttttatccgaggccccctccactccttcagcggcagctggtgctacgccgggagccgttattgtgcggtactgccgttgaggaagttcttggcgctctcggcgatgacattatgccgccgtgaccgcgcacattcctcagctcccgggaattcttgatcaaatctctcatcccaggctgttggatacgggtgcgtacaggatgcgggttgaatataacttcaaatagccctgaatttgagataaagggcttcacagccaagcatggaatcccgccaagagcggggaccacgcgccttggcccgatttctacgccatggactggacaagaaacgatgccgtatggacggcgtatcttggtattcgagttcatggaattgttacctggcggaagttgtccagggacatggaatcacagcactataaaatttatgacaaaatattgttatgctttatagaagtgaaagaagaacacaatcggatcgatatatttctgctatagccggcggtcaagtggtcttttcgacgttttgagctttcaatgtcgttagttctgagaatacacattgtgcctcccacatcaataccatccaagactcaatgagtcatatttatatctcactccagtccaaccagacagtaatcccctccagctcctcccgatgctccatgtaataagcctgacccaacatgtgaagcttccggcgatccgtcttcttagacttcgtgcgcggaactgtatcaataaggagatacagcgcaggaacatagtacttcggtaagctctggcggaccgcctcgctcagcgactgagtgagcgcatgaacagcgtgtctctcactaataggatggaaccccatctcttccacaggacctctttccatgttcatgggattattcgccaggtataaatatacggcaagaatgggatcgccctggccatcaatagcgccgagaacgtccacgatggccgcatcgcccgtagacagattgcgtcgcagaacgtactccacttgcccggcttcgacgcgcgccccgtccagcttgagcatgctgtccttgcggcccatcagctcgatggtcccgtcgtgattgtaccggcctagatctcccgagcgatagaggcggtgatttggtctctcggggtgcagctgcgccatccagactggcggtgcaggtaggaagttctccgatttcccagagacgtggtctagatatcccctggagagatgagggccctcgatgaggagttcgcctacggctccgacgggcatcagttggtcagggttatcggggttgacgatccagattgcaccggtggcaggacgaccgaccaccgacccgcggcccatttcgagattgcggttgtatgcgcagagggaggctacctcacccatgccgtattgattcaccacctgcacgcggtccagccatttcgccagtaccgcgcttgagactggctccccgccgatgcacatcatctccagggttgggacgcggtccggctccatgtcgatcgcaactgatggcgttatgaacatcatgttcccctccagatcgttcatgtcgttcatcagcgagtccatagtcagggatcgagtaggaacgcagcagcacccaccagccatgagaggtgccaggaagtcattgttgctgatgtcgaaggtgtatgcatcgaattggaacatccgggtatgtggtcccatgcccatgactcggatgtaatccgtcagtgctgaagcatagctacggtgctcctggacaattccttttggttttcccgtgctgccggatgtgaagagcacaacgcaagggtccgtgggcgtgacggttgaacaagggactgaggtcaccaatggtaaactggaaacggaggcctcgctgacctcgaagacagtttcgacccgatcggcaaatctttccttgtacccggctgaggtgagcatgatctttatctgggtgcgttcgaggacagatgtaagatatggtggtggatcactgccgtcaacgcagatgtacgcaccgccagccatgaggacggccagtcgggccacaacagcccaggtggatttgtagaaggcgcaggccacatagatgtttggtcccacgccttgtcctactagcgaatatgctaaccgagaagtcaaatcttcgagttgtcgatatgtcagatcaccatcccaagagcgaacggcaggagcatcgggggttgtcttcgcgtgttgtaaacacagctcatgtaacaaggcatcatttgcagggccgatgcttgcagtgaattgggtaatcagggcacgatcttgcggggcgcataactcgaggctgccgatcgtctgtctggaggagccatcaattgatgagagggcctggttgaagctgtgcaagaggctggtagctaatggcagcccgatgccggtgtttccgacatctaatcggacatataacctatcgtcggatgtatgtcgtatcgaaaggcggaggccggtgaatggcgagtctacctcccctaaatgccttgccggtatgtcacagcaggcccggcatccgccaatgcattcatcctgactagaggggatgcgcgttggcgcttgtttctggtagacgattgtcacgttgaacccgtcatgctcaccggtctggccgttgtggatgttctccggtctgacatagtgggcccaatgcttcaatgcactcgcggaagagatctctcacggtgtcatgaggatctacatgggtctggacggtcggcattgagctgccatgagctgcctcgcctatgtagcattggcccctttgatagtcttgaccaatgtatagggttgtcgagcaggagaatgctctgattgtgctaacccaggccaattggagtagtcgctggatatgaatatccggatgttcttcctgggcacgtggggatggatcgagggtatcggcgagatgcaggagtcgccaagcgcgtaccttcagggcgaggtcaactccattggtagaagtaccattgactgctacctttaattgagcagtattgggctggggaacaacgattgtaggttctaacagaacaggagccatactgaagatgaactgcaacaagtgcggagaaacaaattaaaacaaattatgaggatcagggacttttctggcctaaatgtacggcggtttacacagggaagaggcatgcagaactggtctcattatgaacttctcccttggcaacctctttgttgaagcgggcactcaataaggcctcgttattgaccccacgggcatcgattgggcaaatcatagccatcggcaggttttagagctcgtaatatgtactctgtgcagcagcgtcactttgtaccagtgaagtgtttgctctgatgtgagaggtgttggtgtttagaaatgggctgcctgggctcgcagagtgggcaattagagccggggggctttgggggcgctctgcgaatcagaatcctcaatgagatggacgaaaaaaagcaagggttataaagtgcgctttggccaatccaatattgaagatcagcagtgatctgcgttgttctttttggcgtaaatagtcagcgttggagtggcagtagtacgaagtacgaacagtcagctgcaaatggagtcaatgtactccttactccgtaagatattaggtgagaatgaaaccagggaattaagacatgtgttatcgattatgttcatttaattcctcagctaaaagtacaaagatacaaacaaaccccatgtccccagcaacgaaatcagacattctgcataaccccaggacgaacaccctcgaggatcgacgatagctcagcccagagtttctcacgcgcttggcgcccctcatcactccgcacaaaaggtgaaagtgcagtgctctccacatgcccatcggtcatatatgcaccatggctttcgagtccagccgaagcacccgccacgagcgttcgagatccaacctcagtggatcgcgccaataccgctttcatcagggttaacttccacccagactctcgtgttaattgcgaatggcagaaaccagggttgagcatgttgatgaccacctgagatccaggcactcggcccgctagttcctgtacaagcagtacctggagcagcttcgataaagggtatcgctcgtgcattttcgcatttgctcggtcgctgacgaacttcaatggttggtcttccttccattctgtgaaattcacccatgcgtgcacctcactcactacgaaggtaagtcggggcgtgcgcgatggatccttttgccgtgtcgccttcatggttggcaggatgaggaggccgaggagtagggtgttgatgacattgacagtgacggttcgctcatagccctcggcgataccaaactgctctgtggcaattgctgcatttagtatggctacatcgagtttggggagctgcgagacgcgctcgctaaatgcaagggccgaggcgttggaggctaggtcgacctcccacacttcacagacgcctagacggcctgtggacttttcaatgtcctcttttgctgcttttcctgcagccacatttcgaacagcaaggataactcgtgctgcaccaagtcgcgtgatgtgacgtgcagcctctagccctaaaccgacattggcgccggtgacgagcgccgtctggtcggcgaaagactgtgtcggatattggggagtaacgagaaattgtgagtaaaagaaacccatgatgaatgaggatttgaattggtgaacaaggaaaaacctcaaatccaacggagaagagatgttcttaaatagagggaaaaaatagaaacgtcatgctgggctgcctggcaacacggagattaacggggttaagcaagtcgacatgttttttactgatctcccgagatcggcattaaacatccttatcaccgaacatagaaggacaaacctgacacttttgggcacaagactagagttcctcatggcaaaaaggtcgatttagctagatagcttgggtatataggcgtggacgctaatagcggtattggatatgaggcgatcacgacatcacaggagtagttgggttatgtccacttctcttgcgcaatatgacttgacagacttctctgaagtggttccgctcttgaaaacagaggcaacacatagaccaccgcaatccaacaattccaaagtcgaaatgtctgtttatccccttgaacagaacgcaccaccagagtcctcaaggccaccagtgaagccaatgtcatactcacggtgaaccaaagagatgacacagcccaaaacatcggacaccatactccccaacagaacatgggtatggcaatggtccaccgcgccgcagtatcaccccataccagaggcaccgttcgccgaccgcgtttagcatcgccggcttgatcagacatgtcctgcaattgaacggtggagaaaataatgcctatgatgacaagaagccactgtcccgaccatccaagcgggtgaagagatagcaaagaaccacctaaggccacttccatcgcccccgatgcgaaacaggtatatcccagtccgttgataatattccgaatgaccgggttcttgtccgcgccaccccagttattgtaccacatccctaaccatatcaacgccacggaatgtcggactcccccggcgaatgcaaggctatatatcggggcaaatatgtatgaaatgagcatgactcgcgttccccactcgtgagatatccggcctcgagggaagggacgccatggtttgttcaaactgtcctccgaaatggctttttgaccccgttgattgttgatggcaaaagggattaggttaattagaagccatgataatgccgcgaaagctctcccagtccacttcagtgattcgacgatgctttgcggaggacggagaccccctgcaacttctgggtcgtattttgacgcggcccaggcgtttgtgatcccgaaaatggtacttggtaccacgatggttttgaaatcgctgaagacgaacagccagagggtatatgagtggtaccacagagatgtcaatgccctttggactattaagacatatcggctcatgactgaagggtgtcgatggtccaatcgagtcggatggtatatgatatacctttggcgttagccttatttctatgtacgacagtccgttgagtttgagccctggggccagaactttgggaatcgacgaagacgctctaataagagaggaaaataagagaccaaaggtcgtagacttttaaatgtctcggacaaggcatacaacctatgctaaatagctggccagatttggggtaaaactatcaaacacattggttacccagatatccgaaaagcctgagtttaggtcatatatcctccgatggccgagaatgacgagcgttgtccaacgttgttttggtcttcctttcgctgcgaccttgatacacacagcccaattcagagccactgtggcactcgaaatggacaaatctgccagttccaaaatattctgtttgttcaccatcatgctatccccaggggcagttgcaatcattgcggggctactggcccaccagcttgtctttattcatggagaatggcatcttaaggcccctacagtcgtggttgttcaccttatttccggctgtttattatatgcgaaccatttgtttgctggaagccctcgagccagcttgtttcagacaatatacttagcgacatgctatctgtcagcactattcacaagcatcacggtataccgactcatatttcatcgattgagatactttcccggcccaaggttagccgcagtgagtaaattatggcatgtttggaaatgccgtgattcgcgtggacatctcgtcttgcaggcctggcacgagaaatatggagagttcgtacgaacaggtgggtaggatacatcgcaacccaagaagtaatgccgcataatattgagattgaatggttaggcccggccgaaattaccatattccaccccgaggcctatgaggccatggatggtcctgacaatcataacacgcgctctgattggtacgaccttctatatcctcggatatcctcaatctttactcgcgaccgacaactgcaccatgaacggcggaaaatgtgggagcaagccttgagcagaaaaggtctgaatttaatggtccacaataggtcagagactgacacagtcgttcagcattgccccagtatcatcggcgagtggtggaaaaggtacggacactgaccagactagttgctttggagcaatcacgccctgttctcatcaatgacctcatgtatttctttgtgtttgactcgatgggtgatttcgccttcagcgaagacttcggcatgatgaagaacaagaggtggcattcgtcgatagcgatgttgcgctcggcgctcacattgctgggtcccttcagtcctgctatatggatcccaagactggggtttgcatttattccttcgctgtggaaggtccggcattggtttcatatgctcgagttttgtgaccaatgcatggctagacggatgaaggtactggaactatatcggtaggcgaacattcgactgacatagagctagaaaacgctcccagatcgcgatattgcatcttggttcattgaggaccacgtcaaacacggatcggaccccacgcgggagcgatggttgagcggcgatactgcaacgctagttgtagctgggaggtcagtatggctgaacatcattgaggcaatagactgataatcgtagcgataccaccgctccgagcctaacgcttctcttctattttctcgctcgctatcccatgcatgttgagaagatctatgaagagacccgcggggttgacagagagaacccagctgccctggctacgttgccacatttgacggggactataaacgaagcaatgagactgcttccagcagtactaacattcagctctcgagtaactccaccagaaggactaatgatagatggcacgtttatcccggggaatactaagatatgtgcaccacgctacacaatcggtcgacgtgagagaccccgtatcgtttcttaggtcagaaatattaattttggatttcaagttgagacagcatatgtctacccccatgagttcattcccgagcggtggtacagccaaccggagctgatcaaggataaaagggcatttgctccttttggcgtcggtaagctacaaccctaccattgatccatgtggtcactatcttccatgtggctagtcgggttgcacgaggacatcaagaggctcgtgttctgactcgttgtttcaatagggcgtacgagctgtgttggccgtcacttagctcttgcacagatccgacttgttactgctgccttggtgttccattatcggatcagctttgcatctggtgaaaataatggcgaggctgtggaacgggatatgaaggaccagttgaccgcgcagcctggggcttgtcgactagtgtttcaacgtcgggtacaggcaatgtgaactgtgaaccggggtaggggaagtgtggaggtaatatgctaaatcgtaatatccattgatttccgatcgagttctttcgaaatctcccgcgggaggggttgaactagatacatcctgcagacaatgcctattcactttcccctactcaggtcgaaatccccaggcaacgtgaatgtcaaatgtaacatagcaaccagattgaatatccgtataagccttctgctccagatcatcaatctgccgcatggtgagcgctcccggtgatcctctagcagcatgaagtcgtgcccacccgaacatagccctcatcccatttgcagtcaagcgcgggcgcgtatcatacacccgatccgcagaaacagcctccgtatggacatctgtaagacccgcattgcgcatctcagctgccaaccgattccagccatgctcgaagcggggtctcatggctgtcaggaacatgcaacctatggtagtagcagcgcctatcgtagaatcaggtctaccgggaaggtgtcgaacattagtgaagttgcactcttcccactgcatagcaccgccaggctttagaagcttagcaagattgcgaataattcttccccattcggatgctgccaaaccggcggcaatcagtcgaacgtgtacgatgtcatactgtccccagaggctgacgggaacatccctgcgggcgtcgagaatgtgcagagacacattgctggggagggttctggaaggtgggtagagcgcggttgatatgtcatagccgtgtaagattgcgtcgggccagttaggggcgaggttgcgcaggaaggctgcagtgccggtggcgatgtcagcaactcgtgcttggggatgcattttgactcgaacggacgggtgcagcaggtagccgatgtttctgtgtcagcaggagtcagtacggtttgcttgtggactgcttcgcaacacagggcttggcgggttggcttactcggtgagaagatggaattgctcgtcgagtctatcgagtggatgttagtatttggtgtttttcattggctgctggtgaagtctgacctttgcccttcggtggaatctcgctgcatattctccgcgtatgtatccctgagaaaggacatcttgggcagtgtactttgattcaaacggacgaaggtcgatgtctcggaatgtacaaataggaaaggatgcagggggctgcagcgtgttgatgggaagagtgtggatttcgatgtgactgaccgagtcactctaacctttgcctcaaaacaaccttggaggtttggtcttctcactgcagttgcgatggtctgatctgtgtactttcccagctgacactctgctgatctccgaattggaggaagttcaggtgaaaaggttctcacgttgtacgaaatgaagtctgcagtgtttatcgacactttccgtatcagacactatttgcatatgtctaaataaatcataacagattagaaacgaggtcttttaacgtgaaatgtcattattcctctcgacataacacttccgctattaagccgcatcgtatataccgaacaactttgttttatactgtcagagattgtcattgctgactctcccaaagatgatccacctgaaccatcgctctccggttctgattgtgtggagtttgatatttttcttcattgctgcagtggctgttgcgcttcgagttgcctctacacatattcgacgtcggggcttgaagagtcatgactatcttgtgtttttctcgcttgtatgtttgaccggctacgtggtggacatgctaattggtaattcggactgactaacttataacgcggcaaagagggctaatgcttcatatcaggggctaccacggctggctatggcggccatacagcgaccatggctgtacaaaacccaggggagttggttagcgcattgaaggtacttgctgtgtctccttgggtgttgatggaggtattaacttatgtagatcttctgggcatccgaatggatgtgggcaacttcgaccgtttgcttcagactcgccatcctccttttgtatatcgagatcttcccagggaatcaaaagttcttttggtgtgcgactggcgtgggatgtcttgtcttcctatactgggtctctgcggtcttgaccattgcgttgctctgtcggccagtggcctacaactgggatcgcactattccaggcacttgtggggacgttttgaagatacagtatgcatctgcaggattcaatatgggcattgacttgggagtcgtgttgctgccgctccctattgtctggcgactgcaaatgtcgagtcgcaaaaagactggtgtcactgcctctttcgccataggcatcctgtaagccgcccgcgagctgagtccctttgcatattcagttgctgaccgctagtagaacagccggtatcaatcttggccggattattcagaccaagctgtgccctgctgatgacctggtctactgcctcagagactcgtctatttttatcatggcagaaatgacggctgggatcttggtttcctgtgttccgacgtttgggcccctattgtttcgcaggcgaaacgtacatccggcccaaccacgcgatttgcccacaattgggtcagctcgaatccgccgtcggccggcaaaattcgattctctcctttccacgcttgaccatagtcacaatgatggtgaagagcgaggccagacaaaggaagcggagcatgccagggctggggctgataatgaagctccagagacaggcatcttagtgacacgcgacctggatgtgcatagtctgaacgtgcttcctcgagtgtcggagaattatactgtttgaaacgcggatattcttgtctcagagtgaggcattctgagatgcacgttcccgggagatctgcacggctccacaagaaggaattgcccaagtggactttttgacaactccagacctggcaacgcagacctggcaacgcgcaaggatgcagatgcttatgctccgtaatgcatgtcagatttgtaccaccttgggtgagtccgagccgtttgtactggtcgctttactattgaagttagtttgagaatacattaaaccaattaattggatcagatttgtctggagtcataaccatcggagcatagatagccttggattatattttcgccaggcatcaagacgatataaggctgtcagaccacgtgcggggaacccgactttcttttgcctcaagtctcccaccttcacaactcaccatggtctccaagtcttttacggttgtggtctgtcatggctcctaccataccccggccccatatcaacctcttgtcgatgccttgactgcgaatggaatcgaaacctattgtccccagcggccgacgtgtgatctcagtcagctcaatgtcggcaaccccaacaacccggatttcgatcgcagggctcccccgggaggctaccctctccctgcagatgacgcggcagaggttgggctgttgctcgacaagttgattgcacagggcaagtcggtactactcgcaggacactcttccggtggttgggtcgccgctgaggctgcacaatattctcgccaagctcccgtccgtgcaaaggaaggaaagatcggtggtgtgattgggatcttcttcatcggggcatttattgttccgcaaggccaatcagtacactcattctttcagcccccggacggaaaagttgttgtgcctccatttatgcgattccatgtgggtttgacaatgaaccaacatatgtcgaatactgaccatcaatgatagaaacatggcatcagtggcctcgggaccatggtcgaccctgaacattacctgttcaacgaccttgccccagaaaccgcgaagaagtgggcaagcacgttgacagcagctcccgttatgaatagtcccctgacccacaatccatatgatgttctgccgtgcgcctatcttgtcttagagaaggatcgtacattgccaaaggagtatcaggaaggaatggcggcaagccagagcaagccgttcacgatctaccatgcgccatgtggccactcgccgcaccttagttggacaaatgagctcgcggggaagatagaggattttggaaaggaagtcctaactgaaagcacgtcatattaagtgatatccagaaatgaatctctcttcaaaatatataaagagcccatctgagttacacttgaacaatctcaaggtctgacgaatgggaaggtgagggtttgtgcaacggcaccttccattcgaggtcaaacactttccctttcccacttcctcacttcttcatttcttcgtctcttcagcatttccaaccatttcccatctctccttccattgcagccatggatacccctcgctatgtattcggcgcccaaggatttggtgtggcctggacagctgacaatgtcgaccacctcatgaatagtctcagagaggctggaatccatcaattcgacacggccgccctgtaccccgcaacaaatcctggtgaatctgaagagctactaggtaaaaagaagccagagaatgccatcatcgatacgaaggtcctcttcattggcgatgactctttgtccttcaaaaacctgggcgcctctatccaggccagtttggagcgtctgcaagtcaagaaggtaagaggaagacgtaaatggactgtgagtaaggctaatattggtgatttaatctagatccacaccctctacgcccatgccccggaccgcaagacccccattcctctacaagctgcacactttgaccattactatcgtaaggggtactttgaaaggctgggcctgtccaactacagcccatctgcgatccgcgcctggatggaaatcgcagtagaggaaaacctgattatgccttccgtttatcaaggccagtacaacgtcttctgtcgaggctacgaggatgagcttttccccgtacttcgcgagttcggcattgacttcgaagcaacttcgccgttggcgggtggattcctcaccggaaagctttcctattcaccatcgcctgaacagctggagggcacccgtttcgaagttggagagggtaacatgcttggggcagtttaccgcatgtggtacgatcagcccatctatcaccaagcgatgcgaaggttggacaatattggtcaaaggctacagactacgggtgcccaatgtgctatgcgttggctgcttttccactccaacctcaaggatcctgaccgcatcgttatcggaccaagcactctaaagcagcttcaagactatgtcgacgcccggaaggcgggaccgcttccagcagccgcaacagccgagatcaatgcactttggccgaccctgaaagaagttgccgccacgattattgagaaggggtggtggtccctctgattgatatgttcaactcctgggtgatcgtggccaagtttatcatgaaaagaaactccaatgagatgataagttattcataagcggcagcctagagctcggaaccccctgtaggcatgctgtcgtccagctaagacttgaatccacagataaaaacaaattacatgcaatgatatctcctagttccttatcatatgtatttctctgcgatattatggcctctaatccctttgtgacctacacaatcgcccattctcacccactgtccaagcctcactacccacagccttaaaagcgtagagcatatagtgagggtcatactttctcttaatctcttgtaggctgtcgtagttgtccccataaaatgcctgctgccagtccctttggtttgggtcgggttcgttcaaatatgcaccacccccaggcgtcaactcttccagtggtggcataagttcatcggtaatgagctgcttgcgagcaacattgccatcccagtcagtatagtcgaagggcctatattaaggttaataaaggctggcctaaccccgaatgggagtggaagcaggagacatacgctccagttacgacattcatcaacgcatctcgccaagctggattgacactgttgtccggatatgcaactctcgacgagttcaccataactcctgaaatgaggaatccggcgtttctttcgacaatattacggaagatggtgttcagatcgggcaggtcttgttcgactacggaccttggaataagccgaccaccgggaagttgatcggttatgttgatcggcgggctcatcgtctggtaggcatcgtagtatgtagggaaatcgtccacataatatgctgttcactctctgtcagcatcctctccacttttgtgtcatctttacttactgtactgtatcttgttttgttcgaggaatgcaatcaaaggtctaaaaagagaattggaaagagtcgctgtacccccaggaatggtcgtaggcgttgttgacagtgtcgtgttcgttaaccaccaaatactcgtacctccagcatccccgatcgacggaagaattgatacaaacatggcgaccgctgcaaagaatgtatctcgagatacgccggtgtcggagaatgtcaagttacccgatgccgtcggcagctcagggtaggctttgctcgtcatcgacacaacaacaccatatgtccctccccctccacctgacaaagcccagtacaggtctgggtgatttgttggcgacgcggtcaccagcttcccatttgcgagaacaacctcccattccaggacctggtcagccgcgagcccaacatgggacaccagttggccatgcccgccgccttgcgaatatccacccgccaatccgacggttggacagttgccgcccacgataacaagtccagctctgtaagccgcatcgctggcttcaaaggattggactccagcccccatcttcacggccttaccggaatagattggtgagtcatagtccactatggacatgtctttcatgtaatgcatccagatcgcgagccctccagctccagtagacttcccaagcaggtcatgtccagtattacggatgacaagacggatattgtgacgagctgcaaaatgaatagttttctggacatgtgcagcatctgtcgcattcacggtgtactggacatagttcccgatcgtgcaaggtgaagtcttggacgagaaggcattgcagcttaagttggtgtatattggcgccataattgacgaggagctttcatagtgcgtttctgggaatccccaagtggactggagttgcgcgcattgcgattgatcgtacggtgtgaacgagtcgatgtgacagacgctggcaattgggactgttgcaatcaagttcccattcactgttttgttgaatcgggcccatagttgatcctcgggccagcagggatcttgtggcatgcaacgacaggcagggggacttgtgtcgtctgcagccgaaagcccgcaaagctgagctgcgacgagaaggacagctaaatagagccgcctccgggcgggacaggggcttgccattgtgatactcgacttcacttagtgttcctgcgagcagatagattatatacctgtagcgaagacatagccccaggaatatgctatttcctgcaaagtgattcagccttgcactcgaaacaacgtgcactgcatgtcagacgtacggcggccgaagacggccaattttgaacatgggctttctgccacgcagaaagttagtattcggcgcgaatggacgcctacgatacaaagttgtacgttatgaaaggttgaaccactagcggtgaaaataatattcgtattaataggcattgtccaaattggccgtttctgactgccgtagggagaggatagatgctgaaatatcacatcacttctcacgcatatgcagctgtgaccccaattctgagtcagtggagctgggggcctggtttcagattcaggaataagacactcggctcatcttaggtggcatgagagagcctctcgtcaaagttggagtgcctaaagttggcgtaaccaagtatggagtgatacatatcacttttagagacgctggagtcagattctattactataggatatatgtatagcaccttatattgccgcaaaggtaaacggctagagcatgatataatgacccctagtcctatgaaacaaacctagaagcattaagacacaaccacttgatacgaccaaggagctgggattgttgaagcctccgggggcgtggttagaggcaacgggattcgtggaactttgaaagagtagttccagactggctaggctacttcggagtggtggcatcttagtttctggcaatgaaaaggtggccgccattctgcctcgggggacgcccaggcgtcgatagattctcaaaacgaaccgagaaatttgtgtacactcaggtatgtatgaaatagacaatgcatgctagtttcgaatcaagatgaataggtagagaataatgcaggcacatggtcacagaacagggctggtgtacacctcaatagaagcctttttcacggtattacgccatccaggaaagcgcgcccgtgggacaatcgaaatccgatcgcctggttggagattttgcatccagcgtggtttctggtcgccgttgtacgtaatccggtgatgcatggtttcgcctccagcgtgaacattggtcgccagacgtaggtcctcggctttggaggtatcatctcggcccggtgacctttcaataccaagctcgaaccacgtccaagagtttctgaatgtaccatgatcttcgcgatagctgctccatccttgatcatggctccagatgttgattctgatctctcgaacgggaaatcgctcgccttggacgggctcagatgtcaagtatggagttcgatcgcgacagtcaggttcagtatattctattctgtcttctctgtagacggcagataacacccagtatcctgcaaattctagaacgtccaggacgagttcagatggcaacttttggcggagaatgttgaagctctcgacggcatctgctgagttccttgggtaatacattgggttttcttcaggggatgaaggttcatgtcggagagagttaacgtcttccgatgctgtggagtatgaggatcccatggtgactagaagaggtgatgtggttaggccaggggtacgcccgattagatcggccacgcgtggcttggcatgatcgagctgtggctatgcaggatcacgaggatcccgaggatggcgaggaacggggcataattcttcccagcgtctcggccacgtaacgacttaatgttgggcaataaaaacacgtgtttatggtttttcaagtcgtagatccggaaagaaatgacggcctgccggttcggttggattatacacaatgatatatatggtacattacaacaatatataaccgccagtgcgccatagtgtagttcaccagcacaacatttcgtaaaactagtatatgtttattcttttactatagttccagaggatgcatatctcaccactaggcataggaagcttgaatacgctaatgatatagtccgtaagaaggcccatctcccagcgaaagcgaattgtcgggctcgctccttaaactcatcgagctcgtaatacgccctcaaagttccgccaaaccctaccatctgccctctatcctagtctcccggacacgtctgatggaaaagccgtgccatagctttaactcgcccgtgtgcaatattatctgtcatctcgtcaagaacatcttgcccactagcagttctcgcgggatcagcctctaggaaggtggggttgtctaggtgggtgtttcgtaagtcacgaatatcggccggaccagtgtaggggtaggaggcgagctttttccatcggcgttcgaaatctgcgagggggactccggttcgtcctgtctaggagaaatcccaatgatcatcctgcgcgctgaaactgaatccctgtgcatcccaaaggcgggtcacccgctgctcacatattcgccagactgaatggcaaaaggcgttataggtcatggtctggtcctcttcgggctcatcaggctgcaatgttgcttgggcttcaggggagttgcgtggctgagacctgtcactagggtcaaggagtgggcttgttgcactggacagagactctacaatagtggtagcgaagacggagccgcaactccggccaatgctatgtgagatgccccaggcgttggatgtgccctggtcccctattgtatcggccgctgccatagtggtgtagttaaattctgggttcgtgacccatcctccggagtaatacgctgtggtgatgagcgtgacgcgtgccccgggctctaacacacctttaagcctagtgacactcaggcccttatgtcgatttccattgtcgaggagcatatcgaagcctgggagtccgtggcagaagatgaggaggagaacgtgagctgaggttctcttcgcgagttcggaaaccctttttgcttccgtaagaaattggtcgatcatattcgctggacgaacaacctttacaggcgagagttcatcattatctaggagctcttggctgaggcatatcttccgctcttcataggggtttccgtgtaagtatgggccgtacttgtcgacaagcttagcaggctccacagcggttaaccaggtttgttccattccaaggccccgaaacaaatagttgaaggcatagaagtctgaaataaaccaaccatcatctttagggtcggcggtggagagggtagggtgcgtggccccgaggatgatagtgttctcgtagacgacgggcaccgttgaggatacgaacatagaaggcaactcatccggctgacgggcgtggcctccccgtacaaggggttggtgcgattctatggaggtagccatgatgaccgaggatgagaaatgatggattggatggcgaagagagaatagaatggactagggtctgatggattgagtggttgtgcatcgtctagagctgacattgtcacggtgtcgagtacagcaaacaagatgttattcacgcgatagcggattagggcctcgttctgcacacatcgacgagcggatctgtcgatgatctcaagcatttgatctagtagtggtcagtacccagtcgcggagagggggaaaataactcacaagcacactgtggaagctcaatgtgtggaaggggctcctcccaggaagtaccactgagaggtacttgccgctcaagctgaaagtacttctcaacatccagaaaggtcatttggccgattgggagagtgtcaacggattcctttgtgtggggcagctgatacagggcttccactgcagcttgaacatactcgcactgctcgcatgtctcctccttgtcgccttctttgttgtactgcatgaggacttctatcaggtccactagttgttttttcgtatgtttcttgaggatctctttgacgtcagtgatcgagtggtgggtagaactttcggaggattgcttcggtgattcatctgtctgcatttctttctgatttgccggatgatttggataatgtgaggagagtaacgtgaagtaagaaaatgggtgacgattcggggtggatgaaagccgcgagtcagatctgagacctcgagacaactaatctttcaaggttaggaaagtacctccctacccaggtagctgcctaatcaggatcggacaacattccaaggttccaaggtctatggcaggcgatgaggctttctttggaaccggaccgggcgtggcctccctgtacaaggggcgggtaagatgctgtggaggtggccatgatgacagagtgtaagaaatggtgggtgggataggaaagagaagaatagaatgcactagggttcgatagacgtgaatattcgaatgttcagtgtttccatggatacgactgataagaaggtacgatctgatagaccttctatataattgattggacctgatgtgatgaggaaagaagaaggaatcgactggaatctgacacaaatgaatgtctaatgacttttagatcactttcagatcactttcagatcactttcagatcactttcagatcactttcagatcactttcagatcactttcagatcactttcagatcactttcagatcactttcagatcactttcagatcactttcagatcactttcagatcactttcagatcactttcagatcactttcagatcactttcagatcactttcagatcactttcagatcactttcagatcactttcagatcactttcagatcactttcagatcactttcagatcactttcagatcactctcagatcacttttagatacgagttcagttatccggttagaagacttccattcattgttgattattcctctatacttcagagcgccaagcctacctatgtacctaattaggcttagtaccctcaaatgtatatatcgactttctttaggtataggatatctatgatagctacagtgcaggtgcaataccatacagacctaagtacgtcgccacaggataccccgagcaacacaagcgtggtcgctatattgcaacctggttcgcgttccgcaatttcggcaacatcattggtggtgctgtctctttgggcataaaccacagcgtcaatcagcgcggccaggtcgggtaccaaacttatcttgcctttattgccatccagtgtcttggacttgtcattggccctctattgtcaaatccagagaaagtgcaaagggacgacggaacgcgcattgaggccccccgcggcatccactggcgtgaagagctccgcacgatgtggcggctggcaaggagtaggtcgatcttgcttcttgtcccgctgttctggtacttcgggtggatccaggcataccctggtacatatcttgcgacctatttgaccgttcgtgcgcgtgcactcggaagctttatgtctgcggttgttggaacgctggcaacttggatgggtgggacgttagtagatctgccttggttgaaagatcggaagcatagagcaattatcacatttatcgtgatcgcacttctgaacagtgcgacctggatctgggcgggtcattattcaaaacgaataccgacacaccaaccctgttttagactggggagaccagcgctccttcggtcgtggctttggcctgtatctctttgagcgcagtagtctgggcttagtcgagaattatacctatctactggtgtatagggaatttgtcagactcaccaggcgatcaaattcgatacagttcattgcttcgggggattgaaaccgccgcagttgcagttggatttgacgttcaagctgtgccgacagctttgatcgcgacagcgagcatcaatcttagtctgtggttcatcgccttgcctttcagttactatgccaccctccaggtcgttcgaaaatttgaattgttggagaaaggaaggcatgatcgggatggaagtgacagagtggctgaacaggacgtgactggacgatgaacgctatcgtcataaggctggtctgtgtgatttttacctttttatcaatatataaccgtatccgaatttcgcagatcctatcacatatatgaatattctaaaatgttcttaaggtatcgtcaatgcactggctttagcgatctacgaccgcaccatacgagtgctaacagtatgtaccgtatgaagatttaaaaagacatgggtgaacgaacccgtggacattggttacgcctatgtatgacaatgcataatacatcactgcacttgagtctgagctttatgacgggctatctggaggcgatcttatagagtccagtctgcgagctaaattataatgctgatctgcctgcttctctatacaccgaggtctgttcaagggatatagttcggctacttgggctttggggtttgattcgaccaaaagcccgacgttattctaccgaggctcaagacgccgtagatcgaggatgccaagatcccaagtcggctatatgccgatggccgcgatggtatatattcgaccgtggagattctgcaaatattgaataaaaccgcgaccatgtaccgatcacaaattcaacgcgctctacggtcgcaatggcctgcacttcggcaacttcaatgtcggacggggttgtcccctcgagctcgtgcggcattctccacctcagggcggcgcgacattatggggatgactggctttaccgacgagcagctcacagttcgtgaagctatctcgcacatttgttccagattcccaaatacgtattggcaggagcgtgatcaacaagaaaaagacccgaaggaattccatgctgcgttggcgaaagatggatggcttggcattgctttgcccgaatccctcgggggcgccggtctaggtacagttgcgcagacgttttgttttgttcttacatagactactaaccgcctttcaggtatctctgaggccacgatgatgatgcagacgattacacaatctggcgcaggtatggccggtgctcaggctattcacgccaacgtttatgccacacagccattggccaagtttggcaccaaggaacagctggagactaccatcccaaatattataaacggcacatggcgcacatgctttggtgtcaccgaaccaaacactggcctagagactctcaagctcacgaccttggctagcaaaaccgatgatggatattcagtcactggtcagaagatctggatcacatgtgcgcaagtggcatcgaaaatgatcctccttgcccgaaccacgcctcttgaagaagtcaaaaagtccagcgagggtctctccttattttgtattgacatcgaccgcgaaaaccctggcttggatctgcgcaagatcaagaagatgggcggacgcgctgtggacgccaacgaggtcttctttgatcattataagattcctgcaaacacgttaattggcgaggagaaccaaggctttaagattatcctccacggcatgaacgcagagcgatgccttctggctggtgaggcacttggtcttggctatgccgccctggaaaaggcctcacagtacgctaaggacagagtggtcttcggccgaccgatcggtcagaatcagggtgtggcgcatccgttggctgatgcgttcatgaaactggaggcggcgaagctggctacctaccacgcagcacgtctctatgataccaatgatggatcggtgcctttccatgaaatcggtgtcgcatgcaacagtgccaagtatttggctgcggaggctgctttcacggcgtgtgagcgggcagttctggcgcatggtggtatgggatatgcggttgagtacgatgtcgaacggtatatgcgcgaatgtttcgtacctcgcattgcgcctgtgagtcgggagatgatcttgaattatgtgagcgagaaggtccttgatttacctagaagctattaagtactatctgtacaataaatgagaatagacttacgcacacatcctgctgtcaagtgttgattgaaactgcgaatatgggatgcccagaatccagtatttctctttgtctgttcttaagcaacctagacgagaatgtgtggcagtccggataagactgtgcacaatatggatgcattctagtatagccaaatataaactgatgtttggagtattcggggccccggtaacgggctgacaacgaggcgtccccaattggcggggaggagtcgaccttctccggtctgattgtcggaccggtggacccacttcgctgagcttccgccttttatttcttgtccccctctcttctccagactttcaattgtgttgctctttttggtgattcttggatactctcatccatctcatcatgcttccccagactagggcccgtgtgcccgccgctctccggagcctgtcccggactaaccctgtgtaagttgcttcaattgcgtggcggccattgcttctccagtgactaacttctattttctctctagtcggactctctcaaccactcttcctcgcttccagaatgataaggccctcaacaaggtctcccgccacatcacgcagcccaaggcacagggtgcctcccaggcaatgctgtacgccgtcggtttgaaggaggaggacatgaacaaggcccaggtcggaatttcgtcggtgtggttcaacggcaacccttgcaacatgcatttgcttgacctgaacaacaaggttcgccagggtgtccaggatcaggacttgattggcttccagttcaacaccgtcggtgtcagtgatgcaatcagtatgggtacctctggtatgcgttactctttgcaaagtcgtgatcttattgccgattccgtcgagaccgtgatgggtggacagtggtacgatgccaacatcagtattcccggttgtgacaagaacatgcccggtgttctgatggctatgggccgtatcaaccgccccagtctgatggtctacggtggaaccatcaagcccggttgcgctgctacccagaacaatgccgatatcgatattgtgtctgctttccaggcctacggtcaattccttaccaaggagatcaccgagccccagcgctttgacgtcatccgtcacgcctgccccggagagggagcttgtggtggtatgtacactgccaacaccatggcctccgccattgagaccatgggtatgacccttcccggttcatcctccaacccggccaactcccaggccaagtacgttgagtgtctcgccgctggtggtgccatcaaaagactgctcgccgaggacattcgccctcgtgatattcttactcgtcaggcctttgagaatgccatggttgttgtcaacatcactggtggctctaccaacgccgtgctgcacttgattgccatcgctgactcagtcggcatcaagctcaccattgatgacttccaggctgtgtccgaccggattcccttccttgctgacctcaagccctccggcaagtacgtcatggccgatctgcacgccatcggtggtaccccggcactcctgaagctgctcctcaaggagggtcttattgatggctctggtatgaccgttactggtgagaccatggctcagaacctggagaaggtcccggacttccctgaggaccagaagattatccgccccttctccaaccctatcaaggagactggtcacattcagatcctccgtggctcgctggcccctggtggcagtgtcggcaagatcactggtaaggagggaatgtgctttaccggaaaggcccgcgtgttcgatagtgaggatgatttcattgccgctcttgagcgcggtgaaatcaagaaggaggagaagaccgttgttgtcattcgctactgcggtcctaaaggtggccctggaatgcctggtacgtacaatgaatctacaaactcgctgaccataatgctaacatcattatagaaatgctcaagccctccagtgccctcatgggttacggtctcggtcaatcctgtgctctcatcactgatggtcgcttctccggcggctctcacggcttcttgatcggtcacattgtgcccgaagctgccgttggtggtcccatcggccttgtaaatgacggtgatattatcaccatcgatgccgacaagcgcgttcttgatgtcgagctctccgatgctgagtttgccgaccgcaagcagaagtgggaagcccgcaaggctgctggtgacctccctgagactggtctcaccatgcgtggtactctgggcaaatatgccagaaccgtccaggatgccagccagggctgtatcactgatgctctagagtaaagctttccttggtttcttctttttttttttgggtctcgggccatgtctgaaatagaaaagcgattccccgttatggagcctgtgttatatatgatatcattttcaataatactttctttcttgttcaatcagattgcctttgacgtttcatttggagttcgtgttgggttctacgttctcacttcaagcgtcggcatccatactctagatggcgtggcaatatgcagatctcccatctgtgagtttggtgtggaactgattgtttatagtgcatgtatagaagaaacgaagctgtgatgaaaatgcccaaccttccttatcacggggtatcagcccgccttgtcacctgagccctggagcccccggggccccggggccggtggtcctgattagtcataattcaccaggcggtggctgtttagggaacgtccagctcagcttcctgtactttcccctggtacgcgatgagcattccaataacgcttggatggcctaatgtcacctcttcggcggcttaccttgacaacgaggcgttctatgttttccttcgccaaaaagtcgcactagcagttaccgctaaactcgggccctccaattcctcagcaggaacttgttgatgaggaggtctgtcctgactacaatccggcgactttctacccagcaaagcccggggaagtactggccaagaagtttcaactaatcgtcaaaatcggctggggatcccaatcaactgtatggctcgcccgagacatttcaaggtacctacgcatatctgtaacatgtgtgcctcccttgtgttgactaccgacaaactgactctgatcctcacaattaagacttaaatggcaatctgaaaaaaacagtgacctgaagataatcaacagtaatgatgccgacgatgctcggcatgaggatgacattgaaagccatatcacgcagcaaaatccagagcatcgtggctgcgtgattctacggacatgcctggatagcttcgaagtagatggtccggaagcaaagcacatgtgcctcgtgtacgaaccgatgagagagcctctctggattttacagaggcgcttcgttgaccgcaagcttcctttgcccattgcgaaggcctatatctacttcctccttgtggaccttgattatcttcactcagagtgcaaagttgtccacgcgggtgagtgcttggcgccattctcctgtgcctatactagaatatgaaggcctaatctacataccagatctaaagctagggaatatcctcatgagctttgaggacgaaaatgttcttcccaacttcattaaacgacaacaaccgatgcaatgcaaggttgacggcgatagtgctctgactatctaccgctgccataatgacttcggtgctcttaacgggagagaaatcaagaatatggttcccaaaataaccgacttcggcctcgcaacaagactggacaagccgtctactcggaacggaatggtaggagagcagctgggaatttatcctatccaaccagactattaccgtgtcccagaggtaatccttggctgcggttgggattttaaggcagatatttggaacttcggtgtgctggtaagacccctgtatctgttttctgggagtgaatgtacatccataatggggctttggtttccatttcctttggctacagcggctgtctcaggcttcatgctaatagtcctgttcggccagatgtggaatatcctcgggagcaaggagttgttccagcaggtacatgatacaaatacaacgcgaagtcacacctcgccgaaatgattgccctgctcggccctcccccaaaggtattgctcgcgaaatcaaaggtcatgtcagagcgtaactggccgcggcctgccacgaacgacgctggcgaactgtgcaataatgctcaagaattctttgatggtcctttctttaacacggaaggtgggttgacaactatctcgtacgtcaatactaactctgttcaagatgaattccgatatggtgaattgattccatccagaagcttagacgacacagccccgttcctcgaagagaatgatctagaagcatttttatcgtttgttcgacaaatgcttacctggcttccggagaagaggaagacagctcgcgaactgatggatcatccgtttctcaaacttgggggttgatcaaaagctcagtttgggaaatgtaggccgcatcaagcagaaaagagcagtatgccagcaattaacccgcgtgaaatcatgtttccgcaggtgatcggattgtctccacaatatgtgcatgttcatcaccagcggcacgatcgatcattcttcccattcgctcgagggcctgaaggtctgtcgctgtggcccaaggttgatgtgccaagtgtcggatggctgtctgtatcccagtgactgcatccacagcaggaggcacgagttgctccggcaaggtgggcaaaatggcgtcatccatgtcttgtagagtaggttcaccctcaacattaaaaccgccaagatttaatacgtcctcgaaatcctcgtcaacgggatgaatgaagttttcaaggcttgtgaccgttcgaccatcaggattgtttcgcgtgacggtttcgtagagacttctcagatcgagccattcgggagcagtgatgaactcgatctgtgggtccatcagagtgctcttccggaaggctttgtagataattgcgtttgcaagatcgtgacgccagctctggttgatccaggatattgtgtggtatagactcatcgtgtaaactggattttggggcgatcccttacacgccacaatgtacgcaagccattgcctgcgatagtagtgtttgatagtctgtgagattcccgagttgatcggctgttgttcaatcggagtgccagtatgagtaggaaacagttgaacatgcacatttggaggtggcggcgtagcctctacggcagcttggtggtctggatgactgtccagcagaagcaaaactctgcgatcccctacatggttgtagaagaagagcagccattcttgcatgatcgattgcgttaaccaggcctgtcgatggtatcgccaatggatgtccatggctttgagattcaccctgcgaagtgcctccggcgtatgcgtatgtccgatgacccagaggggtaatcgatctgacccagtgctatttgtgcagagcataaagcagacgcgggagttttccctcttagttgtcaacaggtcctgagctggggagaccccgaatggaggcttccgccagaaaaggccggtctcatccatgttgtagacatcgtcttctgtgaattctccacgaaaggctttcagtgctgtcacttgcttgcgaccagtttggggttggggtggaggcacgccatcttcgcgatcacggatttgaatggcatgtcgtcttttgaatccgttcagccaattattgctaaattgagggtgtggcagggtctggtattctgggatttgattccagatttcacgtgccttggtaataataacatcggccgagggagttgggccgggtttctggctcgcaagccattcccaaagtggcgtctccaggagaggccactgtgggtgacgacttaggttggatgccggaccggaatcgagatgatcaaactgtttggatagtatgggtgagatggaagattgggagattctccatccataggttcgttcgaaccaagcagaacattgggattgtcttcctgtcgtaggacctaaaagccttcaatcgagtcatggtaatcgagaaaatcagaagagcttatctattgaagcgaagacgtggcatcccggtttgttgacctattcagacttgacgagacaaccaaaaggccgtattctattcgctgcccctcagtgttccggcttcatattgcagacctggataaaagtctctagaactgacaagacacccgctagttatcttggtatatttcctatgtttgccaggtcgatgctgttggattacactgctttgatttgaggttcgtgcaaattaggacccaagttgcatcgtcgaaattaattatgcactaacttagaaggagagagagagatgaataatctatgaaatagtagggtatttacatatacatatgtaccctgtagatgtagcaaaaaaacaagctagtcggccggcagtattttcagtaatttttccagttggtcttctcaaagtgtttttttacctactaagcctaatcaggaattttctgcaactttatttctatatttaaaggataacattgatcctattcttcttcttcattcattccaagtttcagtctcacttctttgaatctcattatattcgatttatcttcttcaaacttacccaccatgtccctccaagccattcccgaacatcatccagatctcccatccggtcctggtgttttcacactagaacagatacgatgccttgaagaggctgcaatcctccttcccgagcctcagccgaatgcatccacaaacgccagtggtaaaagaaaagtttccgctgcattcagtgcaccaagatctgtgtcaagctcatccacctcgtcgtcctcgtcttctgcgtctgttgccacccatggtttccagcccaatgtcatccgaaccttcgacatcccaatggcagaagaaagtgtcgaggtgcttgagtatattgggttcgtaccggatgttgccagacggatctatgaccgatattgcggccgcccaagtccaagccaaaatcctgatgacctaatggcatatgtcactgcacatctcgcctctcttagccgacgacaatacgataacatgagccatcaggaggcgctcgctgatgttggtcttactcgccaaattcaagaagcaatcacggacccgagattctcacacatcttcggtacccagaccctcacttactgggcacaagataccgttgaaaccaactatgccgctcttcttcgtcaacagcaactgctacaaagtcatgcaaacaagcgcatagctcataaaaagaaacataagcggcccaggcatgagccgagccgagaagaccaagacccatctgagcagcaacccgtgaccgcaacgatcaacatgacaccccaagatttccagttcccagacacatatgtgatggttcagcctgatgccaatatcctcgccgatcacatttctttatacaagggcaaggcatatgatgaattacggccagcgggtgatatcattgagagtgatggaacagtcaacctaagaccactcagcacataccccggcggagacttcaatttcgattttaatgcgcaatactggacccccgaaattgaaacggctgaagagtaccgcaaatttgcagaaaggagaagccctacagccgatacctgcattattcacattcaggttccgcgaccattcatgaacagcctccgaatggagaatctatggtattctcccaactggaaagagtacatctggacctgcaggagacaggctacccctcacccgaaattcgaccacctctggcgacctgggcaagctgatattgtcaggggccccatctgttctaccctcagcacacagctagtccgcatccgcagagaaaacatccaaagtcatatcactgaggacaacgtgatgcgattgctgtctgggagaaaggccactcagtgggtattcgttcaacgcgatgtgattgatcggttagcagaacacattcgagggaagatgcatttcatcattttcgaagccgcagctcgtttctcatgacaacggtctagggcccacttttccgctttgattgcagccgtttttcgggtcgttctttatttatctgttgacatgtttctatctcgcaaaatatcaccctctatggtgaaaatttgcaacttttgcatggctaccccctaaatttccgttgtttgcgatgtctgtctgcctatctcactagtcaagccaccttgctccttactagctgctctacagacggatattccccctatcattccatcagctgtgttctagtttatttcttatttgcaactttgcttgggaaaatctaaacccatcattattcaagacatataagttaatataggttatagacaataggaagtgccgaaggtgtcaaactatattggggccacctcaggctgtagagtacattatatgagaatgctcagtaactaacccggtaaacctttaattgactagatgtttaagacaagtgctagtttgacatatgactttccaagtttaaactattcccattctgctttgcaggtatgctcttttatcgcttatcctaagctggcagattttgtctcgtactttggatagtgtctcgctgggataagaaggctagaaaatccccagcgataatagtgaaagtcttattaacccttaagggccagttctcattaaagcactaacctaaattaggcttattatgcttccttaaagtatctttatatagctaaattacattctagaactctagctccttaccctatattctatctaaacctatgctaatacgtaagtctagtgtactacctatataaattttcggagtgggaaggtaaagaaagcattgacaatcacaatcacaatcaattatatatgccaggcaaggaatcataggtatcaatatacatataaaagaatgaaaaaagaaccattcgcgcttgaaaggaaaataatcgaacgccaacaaacttccccggatataacaagaccctaccaaggcccgccccgactggaacacttcccacaatccaaatctccaaaacttcggcacttgatcagaaccgatgtcccggaatgctccctggtgcctcccagatcatgggatggccttccaactccgtggccaccacacttgcagggggtcgttgaggaggctcattccagctccagtggccctgctgcactgacgtgggcacagagccaggggtaacttccgccccaggggaaaaggtgcgcatattcggatctggactggaaatggcgctggtatcgatatggcctgtggtgtgtgttggggcagtactttccgcctcacttttcccgttaccgtatggcccgccgtggttaaacattgcccagcgtgcggttcgttccgtgcgcccatcttctgatgacatccactgcgagtacacgcggttgcggccgaggacgaagaacagtgccaccaatatggccacaaaaacgacagctgcaacggcgatacctgcaattgctcctgtgctaagcccatgcttccccccagaagagtcaccatcaccgcttccgtcgccgccggaaccgctacctccaccttcggcgggcatgggctggcctgggagtagcatataagggtatttcagagctcttgcgtattgtgtttcccatgtctgggttttgttctgcggattcaaaaggtcagcctgaacgggtgcaccagggaaactgagagtcataccgggttgattactccgaccattccattcttaatgcatgaatctagtgccgtgcaatagaagaatgagggctacatcaaagcatggttagcctcagtccaaggtcatgggtattcttgttgactatatacatacatttgtatcgttcactcgcaaggtccaagtcggaggctacgtcgcatatattagcgacgctgctttgaagaacattttgcaatttgttttattatactcactggtccgacaagttgtccattgtgctcgttgaaagtctcgaaggctcccgaataataaccgtctccactcgctggtacacaaggagcgaggtaatctgcttttacgacagaatgatttgttgggtaaaattcaaaaacgacgatgtcgcccactttggctgttatatcggttggaacaaattgatgtggatctgacttgggtcccacctggattgtatgagtcgagataccggtagaggatgaagttgttgaagttgcggtcgatgatcctgcagccactgtcatggtcgccaaagctagccatgccactggccaggccagctgcctcacaaacattgtacaggggagcgttgacgagcaacacaatatgcacaccgcagtctagtgagttggatttccacagcaaaaggaaatggggacgagggggagaaaagaagactaggctcgaagacaaagaaattcagaatcaaagccagctctccgacagggattattagtattggggatacctttgggctgaactccaccgtcgatctttgatggcttcttttgatagggagggtgtggcccaaagtagttagtgaattggtatgtatatcaagttccaagttttcaaatgcaattacttatttgtctagcgcatcatccagtgggtgtttccagtactaaaggagcagccggcagccttttcctaaaacctcctctggtaactccttccgaacagcactatgtcggcacattcattgctctcttcatttcggatataatggacattgactacgtttccacgttttctcgagaactgccaagcccacgtggactcagatggcagcacagaatttgctgcggtcaaggaagtcaaccttggacggcttacatcgcatgcactcttcaggcccctcatgcccctcagtgccctcggacctctttgttccattaaaagccgtttctgcgcctcaaagacttgaagcctgacggatttattttaaaattttgacttcgacacattaaagaacatgaaacttggacgagcatgttgtgcagtgcgatggtgtgaaggtttgatataatctacatgactcgatgatgttcggtcgaatagtgtcatgcggagaagcaaacccccaagcacaacgtacaatttagccattttacctccctacaactatgatgacgccctaagtctaccgcctaacatcgtatcggtagcctgtgctcgaagtagtctaggctttgtctgtacagggctagcccacgttgcatcgtgaggctgagagactgccacgatatgaccaacgccaaggctaccctatgattcgagggcttattaggtcagtgctgttgccaagaaccttcgtttcaatctcttcgttttcgatcgcggctcctttgtgaacgtccaatgccagtttcagattcattcagtattttagcccttggaagtttgtccctatgtcatggtaacagccgcatctgtatttatcgttcttttttgacgttcatgctgatcaaattttgataccagtctcctagtacatagacggaacttgcgaccgcaagtacctacatatggcggtagtcccatgcttggcatgaaaaatggtcacccgatattattcaaaccccataatgacgttgttcatgtagaaaatattccttaatcggagttcaactacaagatggacttattagatgggcaaggtggaatcattgtctactaactaatggaaccctgcccttcttacaatataccagtgttcttcacgatcttgtacgtgtgttgtatgctgtaaaggcacgcgtaaagtgattatttgaaagtctcttttcagcgtatgaacctgctaatttgattctatgtcgatgcgcttccttgtcgcttcggcccgttagtttaggacctataaagggcctcgggaataactttggcgctaaacaccagtgtctccaagattttgttgttttgacgcggtagctagctagggttagggcgtatgcttaaaacattgtcaacagaacacaactcgcctacccatgctgccgtggtgcattctttgatcatttttaattttgcctcctcgctaataggtactgttgaaacacgcaattgttgaaaccatgcattctctatcaaaccgacgtttgaaaatgatatacatatatacgtacctaggtgcctatacttcacttgactaatgaatagtcgaaccaagtgtgagaaatatacgtacccctttagaagaggccatgatcttatttaaattgcacaccagaaattttggactcaacagtcggaggtctccctgatcacctaatcccgcggctcaaaacactcgagaatagaggggggcttagcatcggagatcatcttgtttaggcaaagcgcctcatgaagcctgacctatagggccggatttcggccacatggatgacctaaatatccacactctcctttatcttaatcgctttatgtacaaaatagattaacaacgggatctgcagcattgcctctgatcgaaatccaacaatagttcagaaagtgcgtttcaaatacagcatgttggtttagaacttcagctattcccttccaagccatttaacaaatatagtcagggcatggatctacattcaaaaggattgcaacctcttcgctttctcttcgtatcgaagttgattatcacttagctgatatcggaattgattgaaaacgtgcgctgttgggaaatcaatcacatcacaaccacgaaatcccgatcctacagtaggttccttctgtaagaataatgatcatagacagctaatgttccatgtgaaaaaggaagtatgaagatcggtcgattgatgatcggactaatggagcacttctcggtcttgacgtctccctttgatttagcgcactccttaaatcagtggtcattagtatcacttaccaagagtcccatgtcgctagaaaccaagtacccgatgcgtatcgtggattgcggtaattgagcaacgaatattcctggatattgatacattgatgtatagacctgaggggtactacggagtagtattggcaatattgtttttgcaatcaacattcatattcgcacatacatatatgtacgtactgaatgaataatttattcaaagttaaaaatgtttgatcttcatagtatttctccgaatcaggacccatacagccgctaatccacagaggtctggagtccgtcgggtttcttggcgatgagaaaaattgccctctgcgagctctgttccttggcatagaagccagttcctaacaatgtggatgaagctgaactcataacccatggttccaagtgggtacaaatcggtcgattagcgattctgtgggtgtcgtcgcgtgtgggaatattctggaaaaggtcattccggctctcaccggaggaatatatcagccctggagggtccgtttcacttggaccaactttgtgagcggagcacctccttgtttcgtgatccaatcacgattgcgtgcctatgtttgcaattcagatctatacctatatcgtagacgccctcgtgcaactaaataagcttaacgagcaaggagtgtccacctcactcaggaccattcgcatggctgtttgaacaaaacccgctattgccccagtgggaaaaatttcccccctcttgatgaccttcagcgtggttttcgaacacgtccatcaccatcatggggggtcatctgttctttcttgctcttttggctctgcttatcgtggggattcatgcagcagagtcggatacaactgtcttcccatcttgcgcggtatgtacatctctcaaggcagttcaatgtcgtgtctcttgctgatgagtatgtgctagatcgcttgcgacaaccagttattcgtcgactgctcactgagcaacaatatatcatgcttctgtgccagtgactcccgtcccacggccttgttagattgtgtcgaaagtaactgcacgacaaaagaattctttagtgcgtctcgatcgtgattcatctacccagcccactctaactcttctagctacaaaacgtctgtacgaacaagaatgtgatataacaccgctcgaaggccctccggtggtcaaagtttcaactctgatcccttttatacttgcgtcggttttcttcatcgcgagaatgatcgccaagagcagcggcctcgctggcggatggggatgggatgattatacaatcattgtctcctatgtcagtgtcacttcttgatgtcctcctatgtggtattaacaggcttgcagattctgggagtcgccatatatgttctggatatctacagtaagctggcagcccctatgtccgatctggcaggaaaaatctaacaaaatcagtgatccgcaatggcttcggtcgaaatatctgggacctcccttttcccaccatcactagattctatcaggttcggtccagtcctctctccaaggctcggttcaaatctaacaagagcagtatttccaagctatggctgtcatgtataaggttcaaatttccctcgcaaagatctccgtgtgcctcttcctcctccgtatcttccaatcacgcacattccgctatttagcgtacgcgctcatcggtatcaacgcctcgatcggtatcacttgggcctcggtggatgctttccgttgcgtgccaacacgcctaacatggaccggctggacgaacgaggaatctggatactgtatcaattttatcgtcgcggttcttgttaactgtctggtgaacatctttgtcgactttgtattgatcgtcatgccggtgtacgaggtggtcaagttacagttgcctctgcgaaagaagatagccgtcgcatcgatgtttatcgtgggctctgtgtacgcactcataaaccccggcctttcttttttctttcacggatcactaaccaatctcacagtctaacgatcattgcgatcatccgagttgtcgtcttttggaacaaccgctggggtgccaatgagactctcggcctataccccctcatgcactggtctgtcatcgaatgtcaaatttccgttatgtgcgcctgcctgcctgcatccagagctcttatcggtcgatggtggcctggtttgctgggaggatcgtcgtaccgaaagaccgaatcccatgcggccgagtactataacaagaagtcaacggggagcgtcaacatcaacaagtctgttacctacactgtgaattatgagtctcgctcggcaacaaacagtgatgtggagttggtggatatagacccgaaacatgggaaatgatggatgaacttgcacttttacttcttctataaatcgtgtatctatcatagatgagatctaactagtacatggatacgattctatgaatcagaactgatactttaatacccttagctgcatataaccgtggcctaccagtctgtatgctctttgccctggttataatatgggcaagtgaccaacatctacattgaaaaaagacagataaggaagaaatgaaagcaaaaggaaaaagagtagttcccttgagaaagccatcggtaccctcaaacagcgcgtatatggtttgaagggcgtttgcctgcgacaaacaacgcctgcccccatccctcatctcctccaggcctttgccccccacacctccctcctctccgatacctccactccttttacatgattcggctgcctgttattatccactttccgatacccacttctacgtcttctagtcaagatgtatgaatgtggcacctgcgactttgagttccgctaccgagaggactgcgatgctcacatggacgaatacgaccattgggtcgaatgtgacacgtgcactcgacaattccgcaatgcgcgtagttgcgagcagcatatggacgctcttgaccactgggcacccgtctttgaatgtgagacttgcactcgtaccttctcctcgcaggacgccgccaatcggcatatgaatgcgaaatatcattggcagccaacggtcccctgcgagacgtgctcgcaactgttctatactgaggaagctgccaatcaacatatggcggtcaagggacactacgagaactactgcgcggagtgtgatcgaaccttcaagaatgagaactgtcttcgccaggtacgagaacgaagctaattccaaccccttcagctagctaggatgctcgtgtcaactgtgacaacttaactaatttgtctgtcttatatacgaatagcacttgaactctcgaattcaccgcggcactgatctcatgtgcccattttgcaatgctggcttcgtcactgcaagtggcgtcacccaccacattgagagtggtagctgtccgaacgctagcaagtggaaccgggacacaatccaccgcatggtcaaccgcctggaccccaaggggatcatcacaaacaagcaaatcgaatggcgcaatgaacagaacacacgctactacgctacggatcgcgcctttaacggtacaaactgggaatgctacctctgtggaaagggattcgcttcaatggctgctttgaatgcgcatcttaactccccagtccacaaggaaaagatttaccattgcctcaacaagcgtggttgtggcaaggagttcgtctcccttgctgctttgttcaatcacttggagagcgagtcttgcggatacgtccggttcggagaagtccagaatgtccaccgacgactgaacgacgctattatgaaccgcaagatgatcacttcgctctaaggcctgaacgatcagatttgcctcggggcaacgacacgacgatcgctttactcagggtcagcatggaacgtttgatggagggggacggcatatgagatattgagctggaatgacgaggcatctttcagaggaggaagttgtaatgatgtggaacaggctctcgaactccaacgaggatctagcaacctatcaaggccgcaccatactcttaccatctactcattagcttgcagtttctattggatttgaagggaaaaaagaaaagaaaaaaaaaacagaaaaatctactttctcgccttttggcgttgacatattcaaatctctgatctgtcatggtatatatatctcggagcacacgacagagcgtagaagacgactcgcaatttcatcgctagaatatgctttcgtcccactcacgtccatgtaatctccaatactccttgatccaaccgctgccttctccgctactgaatatactatcgcctggatattaccactgacgttattcgggaagatcgacgcatccactatctgacggcttttcactcctttcaccgaggtctcgaatcatgaaccgaggtaagcagatgcagaactgaacggttggcgtcaggtttgctgaatggcgtgcccctgtcgtatcaaacctgtaaccatattcgcacttcaataagacccttatccctcacgctatgatacagagtaccgaactgccgaatcgatagttgcgattctcatccaagagtgaacccgcagccgttccactacacctgggcttaactagagttgaagtgggtataacccagaaatgctcagagctgccaccatgccctattgattctcattgagttcccctcatcgggagatgcaaccctagccctaatttgactttcatggcccatcgtcagtaactacgtaggtagatatatgtttcgccaatgtcagcgtcccaatcatttgtatggcaacaaatcgaccgtgggcctatatagacttctggagtgtttgaaaatggactttcgttgggccgtacttcattgaatacttcttatacgtttgttctaggtcagaatttcctcaattgggtctcggctgttgagttgtccccgcctaaaataccatctactgatcttcgcccatgattcattccgcaacaggcctcggatttacatgaacgagggcaaggaccttccaaggttgtacagtaaaacctatttctaagaactaattcagacacggcaggaagcttgtcatatccgggtattcgctaaatccaggtcccatacactagtacagtggcttcggacacggcaaaaagttcgttaaatccatatatccgagatcgttataacccggttttactgctcaggtgtagtccaatttccaggccacagacccacgggcgttccacaactggatccgggggtgggtcgtaaagggggatttccggtccattcacatctgattatccgcggttgagccgagcagatgacaatcttgagctctatggataggtagacccggcttatcatctcaagactatagccgaagcgtgcgggcacctgtcggatttgatgtcggggtaagtttccctcgcgcgatgccgcaagtattaagacccccttccatgtcgctgtagatccgttgaatgcgggaaaacgacagaaaattcccatccagttgtgtaattctcgattgaatttcttgtcttcattaattttccttcttcggtaatacagcaatcctctgcattcagaatgaggcacttttctgcggtggaagagagatccgttgatgaagcccgccggctgagagtggttatcatcggtgctggtatttcagggattctggcatgtattcgcttcagacagcgaattcccaatctggacatatgtgtgtacgagaagaatgcagatattggagggacctggtttgagaatcgatatccagggtgtgcttgtggtatgtcaatatagtcgcccgattcgataactaacggatgtttggtttttctttccagaagtttgacactaaccagccttgtgtctgatagatattccagctcacacctaccaagcgacctttgagcctaacaaagagtggtctacattttatgccaagggtgaagagatccaccagtattggaagcatgtcgccgggaagtacggatgcatggagcacatcaaattgagacaacagatatccgaagctgtctggaatgaggagcaatcaaagtggaatctgcgggtatgtcgatttgtccatagagtcagttcaggaattgacctcgtctctttagattcaagacttggcaagctcgtccacttacacagatcgatgtgatgtcgtaattcaggcgacgggagcattgaacaactggaaatggccaaatatccctggccttgagcaattcaagggcaagttgatgcacagtgcctcgtgggaccagacctatgattacaaggtcagttgagtttgcgatattgctgtatatagacttactcgatcacagggcaatcgtgttgcggtcgtcggtaacgggtcgagcgggatccagattgttcccgcattgctacctgacgtaccacacatcgaccattatgcgcgcagtcggacgtggatttctccgtcgtttgggcgggagcaaattgaaaagcgtgggcggggactggacaattgtatgaaaaagaacctcagccgtgtctgctatccctgttgacacaagttgaatagttaccttcacgttcgaagacatcgaaaccttcaagagagatcatcaggcatatcagaaattccgcaaaggtatgaccggagatacacgaacttggcaacgaacatatatccagctaacggtaaaaacagacgtagagctggagcttcagtctatccatggtatcacccttaccgggcattcaatgcagctcggagaacaggaggtattcacagagaacatgaagcggcgtctggccaataagcctggactcattgatgaactacttccttcctttccgcccgcgtgtcgccgactcaccccaggtcccggctatctagaagcgttgacagatgacaaggtggatcttatcacttcggatattgtcaaggtggacgaaaccgggataattaccgcagatggtcagcaccggcctgttgacatgcttgtatgtgccaccggttttgacacatcatgtactccacgatttgtgatcagaggccgggaaggtgtcaccctttcggaacaatgggaacaaaccccggagacctatctctcgatcgcgaccgatgggttcccgaactatttcatttccctcggacctaatgccgggctgggcgagggcaatcttctcctgctcatcgagagagcgttagattatatcacagaatgtgtgcacaagatgcagcgggacaatattcgggctatgagtgttcggcgggaggcagtcaagcgtttcacacactactgcgatgcatatttcgccggaactgtattcagcagtaagtgtcgcagctggtataagggtggtactgaggatggtcgggtcaccgctctctggccaggtatgtgttggcttctcaaattcccgccgcactggtattgaccgctcaatctcaggttcttccctacactccatgaaggtgttcgcaaacccccgatgggaggacttcgagtattgttatgtgaatgataacgtctttggttggctcggggatggttggacagagaatgagaagcataacaacattaacgtggattacttggatgataacatggttgattttccgcgtccaatgaatatcgctaaataggagaggtcgtggcgatacctgaatggactgtgcaaggcgaaccttgatcatgaacgggaactatgcaaataccaatagcctacggagtaaattgaatcagaacttttagaagaggggaaatagagatatcctggtagatcaagagtatagtatccagagtaggtatcaacgggatgtttacattaggtacatccatggatggatgtacatttggtgacctcagggggctgaccataccatacctcaccggtaatactgtcaagtatttattgaccctaacaaagcccaaacgatacatcctttctgcagacttcatggaaataccaatacattcgtcctttcccccacagaccacgttgctttctcttcgtaccccggatattcccctcctccccggtgggccaccatgaacccgacagacaagcccttccgctgtaacgtctgtcagcgtgcattcacgcgcattgatcacctcaaacgccaccatttgcgccgtatgtatggtcctgcagctacccatgccacatactgaacctcaacagattctggccagaaaccctattcctgcatattctgcaatgcctcatttgcgcgctggtgagacaagccaagacaatctatagtggcaactccggaatctgatcctcgggacttagtgacaatctgcgcgtccattacaccgattgcgccaagcgcggggatcgcgaaattcccgagacgggtcagaggggtaggcggcgacatgcctgtcaatcggttagcccacacatatactacatgcaagcctactatgggtactgacatttgctttgcttggatagtgtacgtcgatgaaactgcgctgcgatggacaaagtccttgcggatcctgtcagaagagaaacttgatatgcaacaacgagcggacaactggtcaaagtcacctagggatcgaagaaggtaccgaaaaccttgagtcaagtgggttgcaatggaagactcatataaaccggaccgaaatatcggtgaaacccgaaatcccccaagaagagccatcatccgaccgaggatcgatcaagttcttacttaatggtggcaccgatagcttcacggaaaactttcggctccccccgcgcagtgatcgtacgcgcagtctcgactatcacaatgcagttggcttcgaggaattgcagggcacagggcttccttacaacatcaatgccgctcgggcggaatacggctctggtttcattgattccgagcctgtcgccccgcaattcttccaggatacattcctggactttttccacggcccattcggtgatgggaataggcccacggagaatccttttcataccggcgaactgagctaccagtgcggcatccctccagggcagcatcctactgcattgcccagagatccacctatcttcgaagcggagcgaccgttcgcaatgacattaattcatctaatattaacacaagcgtggcaggtcccgcttgattctacagcacaggaggagctatctacaaatctcaacttcctattgaccaccgcgcggatacgaaaatacattacgctttatttcaaatactggcagcctaactgtccaatgcttcatatatcgtttgatccggagacaattcccctgccgctcttagccgcggtagtctttatgggcgcaatgtacagtagcgacgagagggaggtctacgtcgccaagagagtgctagattttgcagagctgttcatctttgcgaatgatgtgttctcggcagagagcgaaattggcgccacgttctcagaaagccgatccttcgacgaggaaactaaagactgggattggttcctgaactttcaggctggggttatcatcactattgcccagtactgggctggaaaccgtttgtctcgaaatcgcgcgatggaaaaccgatttggtgaggttgtgaaggttgctcgacggatcggacttgtcaaatcccgtcatcttcctgatgaccaggtctcagagcacctgtggatccaaaaggagtgtcgaattaggtgcgtatattccgcccttcacggattcgcctcgctgatatttacaggacgatctgtatgatttcgctgctcgattgcgcattcttcttctttcagaattacccgtgccgcctggcacacactgaaatggaatgcgatctgccctgcgatgaatcacttttcgtctccgagcacccgttcgcggagccaaactttcgcttccaacgtgatcttagactctcggaggcttttaggaatttgtttgacgaagcacccgagtctagtccaatggaccttactgcactcgacatgtttatcttgattcacagtatgtcttgtgcccgaagctttctttagtgccttgcgccggctaactccatttctagttctattctcatttattaatactcatatgacacttctcggttctgttatatcgactggccgtttgaagaatccgaggaatagtgccgggatcggcacaaaagacagcgcggttcctgaggattctatcctcattgccatccgaattgctctatcccgctggcatgattgttggattatgctacgcagtagagtaacaagcgacgaatgggcgtcactggggttctttaagaatggctataacttttggctggtatcacaactgctgatcaccagaaaggatgctgtcgacgtggtgatgcagatggaggtgcactgcgaagataaattggagaagctgaaggtgttgcttcttgatgaccaggaagatgtatgattatcatatcagaactggagattttgtaaaactaggtagtaaactccgttagatgggccgaggcgttcgtgttaacttggcctaggcgcttatagaatgggaggcgttaacgtttgtgaccttgtgcgacattttgcttattgtactgttcatccaacctggtgccttcttcctttaatgatacccatggatggctatcatgtttctatattatgatatcttgataaactgaacggtatcctcctgaatgtggagtagggggttcacggcccctccctaatccttatcgtcgcatagggtttagtacctctctctttgctgtttcctattggaagaagcgacccgaggcgctcgaacctcatcgatttgcgttctacctgggtgggacacgactataacatacggtagatgggcaatcaaacaccgatgtgcgactccgtacggaggatattgactcgatctacttactaaccttcttcccaagacctcgttaacatgcacaatatccttgtatcccactgctgcttctgtattcacgacgatgaaatgcaagggccggtcaaaggccgatcaagagccgaccacaggaatcgtttgtggctgtactggtgtggagctgaatggctttgaagcattacatcaatctatagttggagaacgatcaatgcctgatatcgctgcttttcgagactgttttgtatcttctggacagcaatgaaggcggttcctcgacttaagtacgaattccaccacgaaaaatatcctgtgtgaaaagcaatatattaatgtaatttaatgcctcattccatccacaggccccttggcgttgcagattggaactcgcgtaaaaaatggggcctgcctttgtaggtcccagggccgccaggattaattaggtaatgccattcctaggtacctaggtacctacctaggtaggtaggtaggtaggttcctctagttatacctggacacttctaatgttacagcactacatgcctgacagctgatttttccgagcgcactcattccactcaacgagatatagcacacgcatattctgacccataccatgctacaagcgaaattatctgcaatgcaacacaatctgaatgtgatattcaactggtctcgggagcaccggagcatgaagcctccgagtcatgaaaacggcaggcggatcaaaaaccgaagcaagggataacatttaagtgcccgagggcggtccacggtacgtccctcagccctggcggtgccaccaaacactattatattgcacagacacactagcgccccccacaaagcccaatggtattcccgatcgagtcactagcgtccgcaagtgaatagccactagtgttcatcaagcaggcggtcttggctaagctactttttgtaagagtctactccgtagttcaacattcttcaaccacccgtggactatacctatctaggtaggtacttgccccacgcgaattgccagttgagatcttctcgacatgcagccttggagggagattgaaattaacgactaagcaaggggacccgacccctgtaaatcattggtgatcctgttgatcgcgacgatctcttcagcttcagccacctccgatcgagatgtcactagtgtccccacgcgcatgcgtctgtttgagcaatttgataggggttccaccactccgtaaaacaccatgggtgacattgcgaatgcctataaatgaccttgtcttccgctgctgtgtggtcctctgatagctcaactgttgtaagcattcttcatcatggttttcagcaaggcaacctttgcatccgcttttgtctccctgctggcatgtgccgccgctgtggaagtgcccaagactgattacgaggtcatcgtggtcggcggtggtcctgcgggtctcagtgcactcagtggtgtctctcgtgttcgccggacggctcttttgattgatagccaggagtaccgcaatggtgtgaccagagaaatgcacgacgtcattggcaacgatggtgagattggatcctaactctaccccgacgtacaacgtttctcatctaacatacttcatcctcgtcagggacccctcccgctgccttcagagggctagcccgcgagcagatctcgaagtatccaactgcccacttcagcaatgagaccgtggaatcaattgttcctattgatggagagtacactgcctttacagtgaccgacggcacgggcaagagctacactgcccgcaaaatcgtgctcggtaccggtgtccgtgacattctacccccgactcccggccttcgcgaaaactggggcaaaggtatcttctggtgcccgtggtgtgatggctacgagcacagggaccagccatttggcatgattggcgatatcagcgatatgctaggcaacgtgttggaaacccacactcagtacagcgatatcattgcatttgtgaatggctcgcaaactgcagagggcgaggcccgcgcagctgaaaagtacccagactgggaagagcagcttgccgcttggaacactacaatcgacaaccgcacaatcgcttctattgagcgcctcgaggatggcggcgacaacaggggtgagaacggcgatcagcagtttgacaagttccgccttcacttcactaccggtgaccctgtcgaacgcaatgctttgatggtcaactaccccactgaacaggcatcgccacttccagccaagatgggcctggtgattgtcgatgataagatcaatgtcactgcggcgatgcgtaccagtgaggagggtgtctttgccattggcgattgcaacagcgatggcagcactaatgtcccacacgcgatgtactctggcaagaaggccgctgtttatttgcacggtatgctcccttatagttcttgatcctagatagatgactgacaatattcgatcacagtggaaatgtctcgtgaggagtccaagtccaacatctcgaagcgcaccggactctctcacagtgaactcgaggaggaggccgttcgtgaaatcggcgacaaccttgagccagtatggaagcgtgctcaggagtaagggactccattgattcaggttgctccagttagtgtaggccggcttcggtttaggcctctactgtttacatagccagctacttattgggtacatctagatgataatacttagtggtctatgaaccgcatctaatctcactgcattaattcaacctcgctactccaatataagacaatgcctgaagcttttggcatcctgccccacagggtaaatggctagcccctttccaagtatgtacctagacatagactgggtgactgttaatattgcgcatatgctggtatgtacgccgacatgggagcaaaatcagcatgcgtatcacagccttggagatattcctaacttgatacgtattacggactacctacatcgatgtccctttactactttgaactgtccagcaaagaaagcaacataattgaaaagctaaagcgggctcggctcataaacagtgtcattcgattctgagaaaggctatcatccattcacaaccctataagctccgaacgcgtaaagtaaaatcagttaatttagatgattattttatctcgtccattttcacctgactatagcccattgatagagagagcaaggaacgtggcgatattggggaagaatacacctgtgtggaaacagcgacctgggttcaagtgtcaaagagcccagagtgaaacgaaccagtgtcagaattgaaatctggaaagagctcagaaagtgacctcctcttgccgtcttctaatagcaattttggcaaatgggtctgccgcaagtcgcattccggacttcagaacctgtggattacatccgtctgccaccttaaagtcgtacttcatgatgatgtgacatagagcaaccttgagctcggcggcagcgaagaatcgtccagggcaagcgtgctttccaaagccaaatcccatatgctctggggaaggggaaaccagttgagcaaaactctcttgatctgagcccggttggcgcatcttgaggaatcgatgaggatcaaaagtattggggtcggggtacacattcgcgtcccacattttactgcaggaaacaagaatgatctcaccctttggaatgatagttccatcggaaagcttgacgtcctcctcggcgcaacgtgccattttggctattcacagtattagttagatttgcctgttttgaaatgaagtgggtaggctcttaccgattgccataggcttgactcgttgggactccttgatcacactgtccatcagtttgagcttgtacattgtgctcttatcccaagacccatccttgaacacggaaatgatctcttctcgcagttcttggataagttcgtctcggccgcaaagatcaaggacagtctggccaagcagatcagtcgttgtgtgaatggctgcagtagagagggccaattgcattgcagcaggttcaaagctgcgatccttggtattttccgcaagccactggatagcatcatgatagcgttcctggggcttcccctgcttgattgcttcctgttgggccaatcggcgctcgtcgataacaggttggatgatgtcccgagcctcctcaagctgcttgcggatcttcttgcatttgggcaaaaatctggccgcaagtgggcgcagcatttcaggccagagtcggagttcagcagcagccatcaaagagtcaatggtgtagttaacagtgatacggagccagtctgggttgcggcaaactttgtcgcccaagaatactcgggaggatagctgggcaactatgccgagagttttgggtcggagcgcaacatcgtgccaatctgagggaagaagtcagttatgctggaccggggtcgcatctgaggcacttaccggtattgtccgtccactgttctttcaacaaaatagtagcttcctctgacatgggctcggtgatgttcactacttgaattagcgaatgctattgcaaacgaagagttcccttgtcatacagagattttgagtgagcttggttcggacagtatcttgaatgatatcagatgtcacggtgaccttgactgcgtcgaagcctgcgatattgacatgatgctccttaaccaaagcagcactcaagctcaagtcacgatgactccgaatatcatcagcgtagttaggcgacaagatagttctagtgccgttttctgtgacgatccgaaatgcaccagcctatacaaacgcgttaatgactccaactatgcatccgggccacaacagaattacataccttggctagaccagccgtaattaggttatgggcgttcttcagatatcgctggcgagctttggcaattccaaattcaaagggtcgctttccgtttacaagaggaaggtcggatttgcgcgatgctgtcaataacaaaaacaggcctgacagaaggaccaagccgacaaggctcacaggctcgaacttggccaataatggcagcttgtcgacggccatagtaaaagcaggtttggaatgggacgaaaattattttgaaacgaccaccgattcggtcataaatttaaaggcacagagaacagacacaattgatgaccatactacctaccaagacgcgtaaaacacaagcattcattgcataaaatatgcaatggagtcctattcagcgatctgccacctaaaaaccgccagcctctcggtaagggtcaacggtgcactgtgacacgtattttgagtatttggttggtatgctaagcggcacaacatatagaaagtacccactcaaataaagcagctgacatataatgtcctacaatacgtccagttacatttctgtttttagtcccggctattttgactgctcgggtagggctttagcgccagctggtggctagctgatgttttgacagtggctggctcagtcctgcatatgcaatgtacaacgttttaccggttaccaagccagggttatgaaccgatttggaccttcgcaaccttatcacattacgatgcccacgggtgtcattagagtaggtagataagcattcgttattgcaatttcgagacaaatcatgttaacgcaatctctccttaccttgcccacttccagatgttttatgtattttacatattcgacctaaatgtgtaaaattccagtgtacgtgctaatttccaacggtgtccagttgaccatacatcaggttcatttactcaccgcgatattgtggtgccgatttagacctaatgtgatgtcaacagcaagccaagagtattcggcagagattgcgtgcgttctaggtttttttcatattgcagcatgaaagcgaggctgacttgaaccaaagtagcaaattgagctggagccaaataccagcgtaactacagtgaggttcggcctatacatgtaggacttgtatttgcacttgacacagcaatatcatggtcacaaacctgagcaccagagatgggcgtgggcaaaagtggcaacgataagagggtaggacagcattgtgaaaatataactcgactgaccaattaaaaaaatgcgagtgaggaatgcggaattcgaatgttgcaggagtagggagttgattgcaaccttgtgattccacaggtgtgatttctatgttcagcctcaatgtcctttccttctcgggtttcgcacccctattgtttaccgcataagatctgcgaccattgaagaatgtggcctcttcggggtggccgttgtatccaatagcgactttccatactgacgatttatcgccgcaggcttgcatagtcccagcaattggaaggtatgtattccagtgggatattctgacaatccagccttgcatactggcaggtagacacgcttggtgtctctcggaacatgtatcagagcctaggaaggagtacggattaggaatatagtgtaccgggatgatccacctatgtggtacaaccaagaaatgatcgccatcggatcaccgaacgtcccgttccgtcccttagctgaacaggtattgtatcggaatgtattcgtatcatgccacaatgaaataccgagaaaacgtaaaggcccgtacgtgcaaatatcgccagtactacgtgtacatatgagaaaaataatatactgccagtgcccttacgaaaccgtcgtttcgtaacaatgtcatatgccaatctccagaaaacacaaataaattactatcaatgtactttgcaaaaagggtgtcagaacctccaggtcattcttggctgtagtgaaaatgccctagctaggatttatggctctatcgagtggaaaatattcgtacaacatatatgaaagcttggtcatccaaacaatatgcataggtggctcctagcggcgagctccgtagaacgtaaagggtggtccttcttgtagttcttccaaaatatatatataaaacatgcgagtgagatcggatgggttttaataaatcgcttaactcaggaccaaatcagatcactactaatagaaatttgtctatacttcaaacgtctgacaagtattattaggttaacataccatagttagttggagtgtttaactagatgttgtatatcgcgatgtcagcggtctcgctttgtttgggctggtatcttacttgggggtgggggcattgtgctatacgcagctaatgggtgccgtattgatacctaggtatgtatggttcaagatgtatggagtaatacagaaggaatgaaaataacacatatgtttgtacgaatttctgagaggtgcaaagaacacatcacatcgatatttcaaacttcagtctattaacgagtgtttcagagtcgatcgacaaattcagagaaatgtccccatagtgcggagtaaatagctgggaaatactaattcaatccgatgcctttctcaccgctactaaattagccacccaagacgcattttgactagccaatataggtccaaaaaataaatttaacttggaggtagaatgagaaacaaaggggcaaaagggagtagtgatacacataaataaaatcaaaagtaggtttaatgtaaggtagggtgaaatgaaagatggagagacagatgaaaaggaagacggaaaaatgaaggaagaaaaggtgaaaggaaaggcgaaaagagtagccaaaagaaaagttgagggcagataccagcagatcatgttggagatttctgtgtgcgattcttcattgcgtagggtagaacccgaaccaggtagtatagtccaatggcgccaatgatattaaagatgatatacactgagaaaaccccaaagtttctccatcgatcatgccaggagatatcccgggcagcaagatactgatctgctacccgaagtgggcaatactggcaccgatcagaagaaagcgggttgtggagcgtgccttgcgctgttttgagatattcggccagatattgaccacaagtctgaccctgcggggggtcaaagaccctcagctctcggttagaacagtggatcggacggccatgcaatgcagtcgcactaatgccacccacgtaataggtgagaggtgaaactcgattcatgaaaatccaaaaccgcggcagtgcactaggtggctgcatgataccattgaataagaggcataggaggaatgtgaatgtagccatcatactccccaaaaccagattgggaactgcagcaatcacaaattgggcaaatgtcgacgcgaagaggaagaactgtacggtaaacagaagaatgagcacctgccgctggggactttggtcgtcaccgtacaccgaaaagtaaaacgaggcccaggtacatatccccagtaaggtttgccatggtagttcaacgagtatctgacacagaatgaacaccgtccaggagtaggttttagccggtctctctcgtagttcgtataacgctcgccgagaaagaaacttcggcatgattctgcttttagtcagtacgttaagttgttatcaccggatctcagggcgaacacatactggttgacgagtgtggagaatattgtgcacagaaggaacaaactaaacaagacattctgaaagccttggcttgaattatcagaactccagaaggagaagccgataaaaagaccacagaagatccctgcgccaaacttggccaggatgtattcgggttggcgataatattgttggaggtcgcgcttcatgacatggtgaaattggacagcaagaggcattgcaaattcagagagcttgcaggggtcggcggggatagcgttggatggtgaggagacgagactatccaactcttcaagaacttgggtattttcagagctgtttttccacgcgtgaacccagtcaatgggcgtagactggccttgggtaccccctccgatgacttcgagcatgtattcagcgggctagcagacgtcaaattagtgaatttcgcaaagggaaaaaagagagagaggcatatcaagagtcgaagaactcacattttcagttgggccacattgacgagctccattcttctccagatattccaggactgtccgagcctggtgaccgacgtctccaaagtagacagtctttccacctttggcaaggaacaataaacgatcaaattgctcgaatagaacggcacttggttggtggattgtagcaagaacgggttggccattgtccgcaagctttctcatgaacttgcagatagcccacgaacttcgtgaatccaaaccactagtgggctcatcaagaaatatcagaagttgaggattggcagcaagctcgactccaatgctgagcagtttcctttgttcagtgtttaaaccatctccgggatttccaataactgcttccgcgaaatcctccattcccagcaactggatcacctcctcaacaaatttgtacttttcctccgttgagacggactgaggttggcgtaatgctgcgctaaatcgaagagcctcacggattgtgcaggtctccacatgaaggtcttgctgttggacatagccagttttacgggaaaagctggcatcaggttcgtggccattgaccaacatatctcctgtaacgaccccaatggtcattcgccgcgctaggacgttcataagggtcgttttcccggcaccggaaacaccctatattcatgtcaatgggtgtgagctgaaagttattggttcagataaatgagtggctacataccatgagtgctgtgagtgatccgggtttgacccagccactaacatcatccagaagtcgtttttcaccacctttcactggaatgtcgtagcaaacgccgttccagctgagcgtatccttttgttctgccattgagggatgggccggaggagccagtgatttcagctcctgaagtggccgaggctgctctccggactccaaatcacttcgactcaacttaggatgtgcatctccacggcggaaaatcaacacttcatgtgtgggggtcgttcctgggatcaactccgtgagccagaaataaagtacatagaagaagacaagaaaggcaaccaatatgccgtaatttctccacacatgatcgtaggagtaatcgtaactgcctgcgatatatgcatccccagaaacatatcgctccccgggaacggatcccacatatgagcaagtgaacgataatccctcctggaagcttaagcttggaatgtattccacgcactcgaaatgacgaccatggaactcgttagcgacaatggcctcgaaagcgtaaaatatcggattaacccatcggatccatgcaaaccatggcggcatatcgaattgaggaacagtgaagccagtgtacaccgcgacacagataatgatgactccagccagagacatagcttgtccgatagtcctggtaacagtggccaaagtgcgaaacatcgtggccattgtcatgacagctgtgagctggaacagaatgtatataaagaaatgagacgcctctctccggagatttgcgaggaaatatatgataatagcagacaaggcgcatcggaaaagtttgacgggaaaatccacgataactcctgctatcgcctctgtaaaggggcgcacaaaggcataggcagcttgtttctccactatcaatctttggctgtatagggtgttgatctccaacagtgatatcaaagcatttgttaaaacagcgagaaagaggaccgatcccctctgccctagtccagcggtagtttgtggaatattatagaacagagaaccaatgatgagggataccacaatctgggcaactgctgaagaaaccaagcctgggatatcattgcgggtccgttgccatgctctaacgatacacagtctgatttgcatgggtaccgagagaaggtagggactagaaggtcgagcatgagtcgattgctcaagacgcttgacttcatccaatttgatctcctctgagatatcaagaggggtcttctgcttgtattgttgcattgacctctgcagctctgcgtgctcggggctgcttttccagtatgcttcaaactccagcgaagtgcgagggactgcatgctccataccgacttgtggttgtcgctcgccaggattagtgatagctgtgaggaaatctgcgctcacttgttggggtggtcgtttccatcccatgctctcaaagtatgggacggccctttcacgagagccaaaatatatttcgcggccttcatacagaaggatgagttggtcgaaagtgttgtacaaagtctccgaggcctggtatacagcgagtgcatgacaagatcccgatagtttggctgaggtacggagtgcccgaacaaagtcgactgcggtggctgcatcaagcccacgtgtgctgttgtcccaggccacgatggaagcccgtgacaaaactgtttccgcgatactgttcataccaactgtgtcagttctcatagcctttccttctgtcctttctccccccaagctgaatagagcaaggcttacctgactctctttctttcccctccactgacacctggaacatagtcgttgccaacattcgtgttgtatgtgtgagagaggccaaacgtctccataaccgctttcacaacggatttgacatactggtctccacgctggttgcctgctcgattgtgcggtgctcgtgcatgcgctgcaaactcaagtgtttgacccactgtcaggttcggaaagtgatgatttgcctcttggttgtacactacgtccccccggtacttttccatcattgttgtgaatggtactcccttgtactgtatctcactcgcggtgtcgacatcaaggccttcgaggtaaccgcaaagcgatttcaaaaacgttgagcatccactaccaggacgacccaggaccagcaataattcgccgctgcatacgatcccattaagtccacgtaatatggtgcctgggccatcgtgagattcctttttaccaacaagtttcacgagccgtttgataggatatgcaagagggtatagaagggccgacaaaatagtttgttgaatctggaacggggatcctttgccacgaaccgtcaacctttcaaacaaaatatcccgttggcggccatctatcgtgctggagtcgctgaagtgggatgtcacattggtccatatgtgagggtcgactttgggagatccgcgatgcattgcatgctctgcggtctgcaggatgtcaagtcgctcattgtcgttcaatggtgctccatgcagcaactctgcggaactcgtcgtgctcagggatggatacgcaggcttctcttcctggaggctcatcgcctggtcgccttcgtctggagccatgcgttatgtgtcttacaacttagttcgggcagaaaactgggcaatggtgccaaagggttggcggttggggggtgcaattacccagctgctatgaaatttgtatttgggaaattgccatctgtattatcctcttcgatttgttattatttcatataccttgcgtctaaactatagaatctcatccgatgactgcggctgtcttgctattaaattcttcaacctcgggtggcattccccaactgcctgtcaatcattgcatggtattcagacagctcggtggacagagggagaataaaagagatactccatacccaaggtattccgcgctacagcaggatatatctatggtccacccttgggataattaacctaagttgccagctcaatattccaaatcgacatggctaagtacatttgaggacaaccaaatatcagggtcattattagagaatgagacaacaagccggttttggcccgcggagtactccgtacgccagatagagaccgaactgctccgtacgcaatatacataacacgagaaagcaaggacacaagtcatcccttacggaatgttcactcccacgggtgtggtcgacgatccaatcttggaaataaataagcataacggagtaataaatgcaagatgccaatgggggtcacattccaggatgcctagcatgagatgactcgcaagtagtaggttaaaagcgatcaaataaaacataaaatagcctaaaagaaaaatatacttacggaaagaaaaaagaaatttagaatgaattgtcgaaagactagcactccatgcggtgagaactataagagaatgggaaatgagaatagaaaccgatactgaaaaagcgatgaaaagtacagaaataccgaaaccaacaaaaattcccaaaaatcatgtattttgcgtaccgttataacgagtctgaagccttaagaggttgtcggggattccgttccataatctttcttcatcagccagccacccacaaggaattgagccctagatatctgttagaatgacacataggatcacatccttcccataaggcgctgatccgttgaagatcccacgcctgggtggatattgaatgcagaatcgcttggttttcagctttagattcacacagcaagggagaaccactgctagaccgggctatctatcatctgtggttacatgcatttggttcagagatacggagagatattctgcacatgttgtctctgtatttgtcttctaaattcttgggtttccattataatcttgatgtacctcgaggacaaccttgaaggttccctcatcccaccaatacctgttcaacatcaggttccatcttgggacaattttctattctcttctctttgtacttgttttgtttgtcttattccttaaaaatattccgctccaaattttaagccgcgatggttgatctatcacaaaccagcccgggtcggcccgtttgcctcgtcttcgggccccagattgccgagatcgatgagagtctattttacatcagccgcaacatcgacgaaaatccagcgttgcacttcctcaaggatgtcttgcgagaactaccgtctttatggtccaccattagtgatacctgggcccctttgtcttcaatccctggagcggctcaacttacggcgctcgctgattgtgttcagggggggccgatagccactcacgaaaatcccacgaatgtgctcctgacgcccctcactgtgattcgacaaataatcgatgcttggaaattcaaagaaaaatcgcagaacaagtgcagaatcatggatgcgcagggattctgtgtcggcttcctcgcggcagtcgcggtcgcgtgctcaaatgatgccaaggaatttgcggatatcgcatccaccatggtccgattggctgtttgcattggaacagcagttgacctggatggcatttcgcatggtcaggcccgatctgtggctgtccgatggaagtctgccagtgagaatgaacaactcaatcgattattgactagctcttcaacggtgcgtgatatatattaacccaaccaataccctatattgtccaacttcatattatcctacccatcctatggtagctgtttgcgcttaagagggtactgacaatgggacatttaggcctacgtctcctgctttacggacacaaactcggccacagttacagtcgcggaggacgcagtagacgacttgatcaaggagctgggaagccacggattgtcagtgaaaattatcgacctgaaagggagatttcaccatgcgagccatatcacagctgttcaataccttagcagtctctgtgatacagatgacaggctccggttggcaggcactggtacctgtgtcctaccactaaggtccaacgtcgatggccatctgattgggaaaatatctgacattcacaaaattgccctggaatcgatcctgaccaaaccatcgcagtgggctatgactgtttcagcggcggttgagcattcgagggagacaaatgacgatctaagccttgctgctattggaaccggccagtttgttccacgtctagtcagaaaccgggttctggatcacacgaacaacagcttgtgggacaccaaacatgaaatgttgccaaacggaatccacaaatcatccttccccacggaatcgatgcagtcaactaatatggctgcgatggccgggacagcaaccccaattgccatcactggtatgggatgccgatatgcccaggcagactccccagagcaactgtgggaaatgctcgagttggggcagtgcggtgtcagcgctcttccgaacgagcgattcaagatggacaagcttcgacgtgagccaaagggcccattttggggaaactatctggccaatcccgatgtttttgatcatcgcttctttggcatctcggctcgagaagcagatgctatggacccccagcaaagactacttcttcaggtcggatatgaagctatggagtcagctggttactgtggccttcgcaaccccaatgtcccgaccgacattggttgttatgttggtgttggctcggatgactatactgaaaatgttggatcaacccatgcgaacgcattctcagctacaggaacactgcaggccttttgcactggccgccttagtcactattttggttggactgggccgtcggtagtggttgacaccgcatgctcttcagcagcggtgtctatccatcttgcatgcaaggtaagatcccattattaactccctacaccaccgagttctaaggctcctctgagaaccaatatggctgactcagtaaacaattcggggcaaaccacaggctctgcaaaccaacgaatgctccattgccgtggcaggtggcgtaaatgtcatgaccagcccacgagtaacccaaaacctagcggcggcctccttcctctcacccaccggcgcttccaaagcatttgatgcaactgcaaatggttattgtcggggagagggagcaggactagttgttctacgacccttagcagacgcaattcgcaacggagaccccattcttgccgtaattggcgggtctgcggtcaaccagggatccaactgctccccgatcactgtgccagactcgaactcccagagatccctttatcggaaggccctgctggcatctgggattcctccagaagacgtcacttacgttgaagcacatggtacaggttcgtgaagccactactaatgtcttgaaatatatgccactaacacaagtaaaaataaggcacgcaagtgggcgatccaattgaatttgacagcatccgaaaggcatttggaggacctggccgtagcgagaagcttcatgtcggatctatcaaagataacatcggccacacagagaccgcttcaggagtagctggcctactgaagactgtcctaatgatgcagaaacaacaaatacccaagcaagccaattttgttcaactgaaccccaagatccccgcattggatgatgcagaaatcgcaattccaaccaagtcaatccactggccgtccgctgctacttcatcttcgaatgccgtggcaatggtgaccaattatggcgcagccggaagcaacgcggctcttgttgtgaaacaatacaaagcgccatccgaaccttcaaatcgagcttcgctccttcctagcgaggtgcccattatcctggcagccaactcggtcgagtcacttagatcatactgcaaggttctgcttccaagtgtccggaatgcacaactgggcagttgtcaagacatcgcctataacttggcagtcaaacagagcagagacatggattacatttctacattaaccgttcccgcagatcaacccaacgagcttattgctaagctggagtcgatgtcaaccgagaccaccaatcctaagaaacagccgtcttctcgtctgcccgtcatcctgtgctttggtgggcaaaatggcaatgaaacaaccctttccgaagacctgtttaatcagtgtgaactgcttcaatatcatttggtaagccttatgaatatctccctcccccaccctttcccaggtttgtggcttctctgtcatgatagcttgcttacagtccgcctgcacttgtttagatggaatgtgaaaaggtttgtcgaactcgtgaccttccaagcctgttcccacgtatctttcagactggtccaattgaagatacggtcagccttcattgcattttgttctcaatccaatacgcatcagcaatgtcatggatatcttctggactccaagtggaccgaattataggtcacagctttggccaacttactggactttgtgtcgctggtggtttgaacctttcagatgctctctatcttgtctcggagcgagccagaatgatccagagcatgtggggatctgagcgtggagctatgctcttagtggaagggacagaggcggatgtacagagtttgttgaatcgcgcgacacagcagatggcagatgcggcagtggatgtcgcttgtgtcaatgggccacgcaatatcatattggcgggagatgagcgatctctacaaatgattcagaagctgtcagcggaaactccttccatccttcgcacaaagagattgaagaacacacatgccttccattcccgcctggtggatagcattgttccttctttgagcaaggtagcccaacagcttcaatacacgccactttctatccctcttgaggcttgttggcaggacggcgactggtcttttgtctctccagacaagattgtggcccacagtcgcggacgggttgacttccagacagccgttgagcgagtagcccagaggattcaagggcctgccatctggctggaggcaggatctgcatctccaataatcccattggtacgacgcgttatcgacacagtgacagcctcctcaaaagaccatctctaccaatccctcgaccttggaggcccacagggccagaaaaatctttcacaggctacttgcaatctgtggtccagaggtgcgaaggtacagttctggcagttccatggttctcaagctaaaagttacaactggatcaacctaccgccctatcagttcgctcaaacacgtcattggattgcatatgatccaaacgcctttgcgccgttgcccgaagacaagccaaccgtgccttcttcgggtggcccgaaagagtttgtgcagctgctcaccaaacagcccaccgagtgcgtatttgcaatcaatacgaaggaccatctttaccaggagtgcacacaaggccacgcagtacttgatcagaacctctgccctgcctctctctactttgaagtgatcgttcgggccgcgggactggttcggccggaaaacgatacatccccgtctatgcctcaccttcaaaatcttgccatttcagctccgcttgtgctcaaccccactggaaatgttctgttgagtcttacccgtgcccgggccggtgactccccttggtcattctctctatacactcgtgagcccaatacgaacttggtgaccacgcatgcaaccggcgagatcagcttgcacccctttggccagaacacacctctcttcgttcgccttcactccatgaaccggctaattgattcatcccgagtggattctatcgccaattcacgggagtcgagcggcctcaaagggttcgcggtctatcaggctttccgtagagttgtcaattacgctgattgctatcgcggcgttgaacgcgtgttcgcgactgagcatgaggccgctggaatcgtgaacctcctctcgtccaagacaaaggatgccgcatgtgatcccatgctcgtcgacaatttcatccaagtcgctggaatccacgtcaactgtctttcggagacaaatgaagatgaggttttcgtatgcactggggttggagaaatcttgattggagaagccttcatgacccgtgatcccaagtcctcgcgttcttggggagtctactccaacatggaccgatctgttaagaacaagatagcttgtgacacgtttgtcctagatcgggagacaggcaaacttgccgtcaccatcctctctgcggaatttactagcgtctccattgccggactggcgcgagtgctcaaaaaattgaacaatcaagccgatgatgaaaaggcatctccagacttgtctcttcggaatgattctaaggtcgatgtcaatcccacgcctcagaacacagcacctgttgttcagcccactcgccaagctgccgcagaacctggatattttgtggtcgtccaagagatgctctgtgatctactcgggatcgtctccgaggagttgttgccatcttcgaatcttgaagaaattggcgtggactcgttgatgcgaactgaggtccttgtggaaataaagaagaggttcaatgtcagcatcgacgcctccaccttgactgaaattcccaatatccaggcattggtgcagacgattttccctgacgcggcaaccgcccctctcacgcatggagttcacccgtcattggaaatcgagaccacagatgtacctgactcggagaacaatacccatgttatcccaacccctatttctgatgctgatgtacatggcctgattgacatcgcacctacccttttcactgacattcagaggagcacgtcgcacagtgaaatgacccaatggaacggattttgtgaatctgtatatcccaaacagatggcccttgtcacagcttatgtggtagaggctttcaagtcccttggtgtctccctagacaaatttgaggctgagggtgttattccgcaagtgccagttcttaaacagcatggcaaggttcgaaaccagctttattccatcttggagttctcgaatctcatccgggctaccgatcgtggctttgtgcgcacaacgatccctgtgcccacaatttcgtctgacgtattgcatgaggaaatcattcgcctctatccccagcacagatctgagcaccaccttctcaagacgacgggctcgcgactcagtgactgtttgagcggagcagctgacccactctccctcctctttcaagatgcggaggctcgccgactgatggaggatgtgtacaccaacgctccaatgttcaagggtgcgactaatcacctggcccaataccttgtcaacctccttggtcgcatggataccacgagggaaatcaatattctcgaaattgggggtggcactgggggtacaacaaaggctttgttgaatcagctcactgctgtccccggtcttcgtttccagtacacattcacggacctgtcctcagggctgctgactctggcacgcaagaagtttaagcattacaacttcatgaaataccaagtcctcaatgttgaacagactcctacgcctgacatggtcggtcaatatgatatcatcctatccagcaactgtgtgcatgcaacccgcaatttggttcagtcatgctcaaacatcaacaagcttctacgaccagacgggattctttgcctaatcgagctcacgcgcaacttgttctggttcgatcttgtcttcggtctgctggaaggctggtggctgtttgaggatggtcggcaacacgcccttgcgactgagcacatgtggaagcaaacccttgtccaatcgggcttccaatgggttgactggacacacaatgactccgaagaatccaacgtccttcgtgtaattactgcgtcgccgacctcagccgtcattttacccccaacccccgggagtcccttgcgtgtcatgaacgaggagacggtaccttatggcaagaatggtgccgtggagctctctgcagacatttactatccccgggatctccagcctattggaaaaccccgtccaatcggtacgtagacgaacttgcttcccggtcctcttccgcgacccatgacaaacctccttcttacactcgacaaacagctcttcttatccatggtggaggacacatcatgctttcgcgccgggacgtccgcagcaagcaagtcaagatgctcctcgatgcgggattcttgccggttagtgtggattaccggctgtgcccagaggtttctctgtcggaaggcccaatgcatgatgtatgcgatgctctctcatgggctcgcaatgtcctgcctaagttatctctttgtcgtcccgatatacaatctgatggaacccaagtggtggcggttgggtggtctaccggtgcccatctggccatgacattggcttggactgctgagcagaggggcatcgagcctccccaggctatactcgcattttacgggcctaccgactatgaagacccattctggtctaagcccaatttcccatatggaaagagtgccgcctcgccagaaatgagctacaacctgtgggaaggcatgcacgagacacccatcactgcctacaatcctccggccaaccaaaatgcccttggcggctggatgtcaccggcggatcctcgcagtcgaattgcattacacatgaactggaaaggacaaagcctgcctatgttgttgcacggaggccacttctggtcggctcataaggacggcgactgtggcgaggacttgcccgttccgactcttaaggaaatccaagcagtaagccctctggcacagattcgcaatgggtgttacaagacgcctactttcattatccacgggacgcttgatgatctcattccagtggaacaggcccagaggacatcgcaggagctggttacgaagggcgttgaggttgaactccgcattgtggataaggcagtgcatctttttgatatttatcctgggtttgagaaagaccacgcagctgctcaagctgttcaagatggttacgagtttctgcgcgatcatgttagatattagtcgattgggactcttgcttgtttgtatcttacttcctacctcataattattacattaatatatgaatgaacctttcggacgatctcacaatatgcttgtgtgcttcgtatcgattaagcctccacggctagaatcatattgctgctcatgattatattgacgaagtcaacataccgtgaacatatatcttacaacaccacaatatcgtcggtactcgagtaacctagttctctttattttggctatatcatcttccttcaagaatgaatctatccatattatttgccagctagtcacatagaaataggctagtcttccagagttactcccttgcgataccaccctccaggctgacttccagtggtgtccacccgcgctgcccaaaagtttcacgcagtaacttctcggctcttgctgctgggacgatatccccaatcgtcggctcctcctttacaggagcagctgggatacgagcattattgggctgaatccttttgaggatctcaataacatccccccatatgaatggggttgccgcggcgaagagacgctcggagcgcacgctaggactgatcagagctatggcgtgtagacgagcagtgtcttccacgtccacaaaccaagctaggaaaattagttagttgttacttggtctgtccacctgattcggaatactaacgcagtgggagaaatttgaatggcgtcgtatctcctttgagcagtccagagacatatcccatagttgaaccaccaatgttcggatgaagaatttttcccaacttcgaatgatctcgcggtcaactcttaatttcagatatagacgagatgttccacctctctggaaatactcactgtaagccacggaagaacggtgttgagctcaaagtgtggctggttcttctcaacccatttccacgcctgtctctcgccttcgaccttgcatgctctatagatgggcacagtggttccacctttagatgcctgttcgaggctcttgtcccatgtgtctatatggattttgtcagcctgggcttaaccttgttgccgtatacatgtagtgtgatgcatatattggggttgtcttaccaacatctaacttgaacccttttccggcagggtagccggccgctacgatagacgaagtgagaacaactcgcttaattgttggtttcgtcgacgccgctttgagaagattgacgactccattcacagtgtaggctgttgcgctttccacggtttccgcagcagtgctagaaggtaagccttgagcctaggtatgtcaaaggtcaactcatatttttgacagaacaacctagtataaaggaaacatacaacatgaatgactcctgatacccccttcacgctctcgtcaaaggcatcggactgctggaagtctgaaaccactatgagttcgaaacgccccgagccgtatcgtttctcgaaatactcagtcagccatggcattggcgtgcgtaccgtgccttgcactaaatatccaagatctaatagaaccttgatgatgtgcgaggcaatgtaaccatttgccccagtcacgaggactttagagcctggaggaacgatgtgattctgagcctgcgtcattctgttggtcaaattttctgctctttgcgagaagttcccttagatcacagaatttgctcaaaatatgccgtatattgctcgagtccccttcaactgtgccacgaaggatccgtccttgaagggaactagcggtgagaccgagggtagtaattaactatacaatgcagcgttgatcgaagcgttgagacttgagactagtaattatggggttgtctcaagagacgatctatcaagttcggtatttctggagctccacaagtcgacgtgcattaacgtgcatagacttggaaacgtgcagtgcttgttttatgtgagctgtgtcatgtcacttcgagatcgacacgggacctccactgctctgcatgttgcggtgggtttattacatacaacatacgcagcagaacgagatgtaacacaaattcccttggagtgttgtgtctggtcccttgcatcgtatgatcacattcctagttacatgtcaatacggacactgccgtatacacgatacccaggagagacgcgatgaccatacatgtgtatttttctttccttgtgcaggtcaatcgatagggattgccgaaatagtcgaaatagttccaggcctagagggagtaaattcggagacctcatgtagagaagattgtctccaacatctgcaacaagacttttacatcccaatcaaattgcactgtgccatccccccttttcctcctattactcattacaccaacatgtcactccttcaagacattgtaagccttggccactaatggctctcataaacgaaggtcttactaatcgatattcaggtcttgatcatcacaggcagcgcgtctggaatcggactggcaacagccaccgcagctctaagccaaggggctaaaatcctaggtgttgatgtctcatgggctcccgtgtcactcactgaacacgcaagttacaagtttatacaagcaaatctcacccatgaggcaacaccgaagcaagtggtagaaacatgtatcaaagagtttggacgaatcgatggtctgctcaacatcgccggcatcatggaccagaattccagcgtcgatagtctcacagacgacatgtgggagcgatgcattgcaatcaatttgactgctccagtaaagctcatgcgtgaagtcattcctatcatgcgacagcaaaagagtggaagtattgtcaacgtcggcagtaaagcagccacgagtggtgctgcgtccggcgtcgcttacacagccagtgagtactcccctaccatgaatcggagtatgtatcagtatcctgacagttcattttcaggtaaacatgggctgatgggtgcaactaaaaatgttgcttggaggtacaagcaagaggggattcgctgcaatgccgtttgcccgggtggtacgttgaccaacatatattattaactttatatcttgtgctatccgcttatgctttctaacaggagttccaactggcattgtacaagcctccgatccaaccacctgggacaaggatgcactagcgacaatgtcgcatatccaccaggcacatgctgctgataggcaggaaggcctgggggtcgaggccgaagacattgccaactgtcttctctttctggtctctagtcagagcaagagaattaacggggcgatcattcccgtcgacaatgcttggtccgtgatctagttcgaaattcgttgcgaactttgaactaagtgaaagggaaactgaaccagactttgaagttggatcttgatgaggcaattggtatttcatttctcatacatataaatcaggctcttcccatctcgtttctcgaggtagataacaaccatgtggcacaggaagtctcagggcgtggacgaaacgcttgtttgggcatgttgtacctgaagaaagaaacataacagttgtctagctacgcaggcaatattcaatcataaaaccaaacaaccaaaacaaagtagcaaggaaaaaagcggacttggcgtaggattcaactccagacgacttccctacctgagtcgctctaagaagaacccagaatccgcagaaatgacctccaacagacaggacgaaaaatggcaaaccaagaccagtcagaactcctgccatcgcaaggaagccggtggatgcacaaaggagggaatacgacaggagctgaatggagtctctgaatcggaccgccatgcttttcaccccgaccttcaagtcctcctccgtatcctggcgggagtaaattacatcgatcataataatgaccgatccaataaacaggaacatgcacacagtcggcgtcatctgtgagagaggatccagcccgagactgtgcattgccatcggaacagcccagccgatgttcatcaaggtaatctgaggatagtcggtaaaccgcttgccaaatgggtatgacagtgcaaagaatgtgacaatgaggcaatccacagtgcaggcccatggaagaaatatcaaaacagtgcctccgcaggcgaacagagcgacggtgagtaagagggcatttgatggggagaccgcaccccgcggcaggggtcgggatttggtccgagatatttgactatccaagtccatgtcaatgagatcgtcccaaacacaccccgcacttcgaaggaatatggaccagatggatagaagcatggcacggtgcaagagaacagcgattgggatcttcgtggatgaaatggatgcgctaaaggcaacgcccacgagataaggggatgtattgaggtagaaccccaacaatcggtggatccgcatcagctcagcatacggtgctatcccggggtggaataagtccaggattttaccctgtggtggtacttcttctttctcatttcgtcgtgtcatcgtggcgtgtgaaagtggaatgcggtgatgaagcgccagagtgtagagaatgggtgaaacggggaagcaataatagaagaggtatgtagtgaaagcgcgtggaaagccaaatatcagatgacgaaaggggccatagagattttaatgaaatatgtcggtgaatctcactatggtctcgtacaagtcaactcgtaagttgagactattcatgtattcagtaaaaggccaagagcatcccttcatcgggaccattcctttggcgctcttggctccactgatagccactatgtggccagctgattctcattccatttgggcgagattttgttggctaatggaacgatagacagatctactgcattagctcaattatttattcctatgtttatgtagactacatatgtatgcaaccccctagtgtgttttatgcagtgttcggctggccagccttgcgcctttgcttttgccgatcaattgatgatatactccatgtattgtagatactagccgagtccaccagttacagaataatcctatgcaaacaattactgatatgtaaatacggagtatagtctcatggggttcatgatcgacgcgggacacatgcatacctaggtagtctttgtactgacaccgtcacaagttttatgtaaaatcaaaggttcctttacaaagacatgccacaatttgtcttaccgaaagtgggtcacgagatggtcgaatgcagatatgatccaagccaagggaaaaacaagaatagagccagagaagacacccagagtagcgtccactgccgctgagggctttcttcgcttttttgaaattgtgccacgcgcccagtctcaagccgatccggccgtggaagaaaatcaatagtatcccctccagccagagtcttgattgtccggttctctatgagaccaccaacatactgaaacacatatcgacccaccacagccttgagccagctgtctcgggtatgaaaccgagctccaaatcttgacctctggtaggtactttttgcaggttcatatcgtagagacttgtattcctggagcattgtctcgatgcaactctccgagggcttgttcaaatcatccgcgtggatcatccgatttatcagagatgcgaggacggcaacatcttcaatggctgtgtttgctccttgtccaatattcggtgtcatctggagaagaagaaattttgttagataatggaaaccccagttcatctaggatagctggcagatcttaccttgtgtacgctatctccaaggatgactatccgattcaagctccaggtttcaaaaatcccttcctcaagtgctgtcattgacgctaccaccttggtcttccagaggtcacccacggtaatatcctgccatatgaccacgttttgcatcttgccacagagatcagctgcgtcattgggagaataccgcggagcattgggataagtgtagacacggtccaatttttgaatgatgaaccaaaacactcgaccatcctttccgtggaacgtaatcacgcagaatttgtcgccgtaatggtttatatgctctccgcttcgcagtccgggtattggtcgcgatattccaaagacacatgcgtactcaaccgtaagagctaacgagaagaaatgcaatagttagttcaggtctaacaaattcggattcaagtgtagggtgcttctgctgcctacttttcctttcttggggagtgatcattccaggatatagttcatctgccagtcgccacatttcagagcgtatacgactgtggacaccgtccgcaccgacaatgaggtctcctcggaatacacttccatcctccgtcaccacacttgcgctgtcacccagcagtcgcacttcggataccctctggttggtaattatatttgacttgtcggggtagttctgaaataatatttcaagaaccttttgtcggtcgagtgagacgatggggtacttaaatctggatttgagcagtcaggatacatgtggggtatctcactcgagattcgagaggagacgctgggtaaaaacctttcgtgaattgtcttaggcaggaaactgctaaatgaatagtcgtcagggaaggaaagatgcatgcgacttatcggcgcagtgagctcttccagactttggtagagaccaagttgatcaagtatctgtgctccattaggccagacaccaataaaggcaccttcctggggagcaatttccgctcgcttttcaataacgatatggtcgatattggctttggacaacgaatgggctaatgtcaacccagcgatagatcccccaacaatgatgactttgaacttatgtgtctccatgctatccgccatgtctgcgcttagaaagatacgaatgcttctaatggctgcatctaataatgcttgttggcggtgaagaatgtcggagataagtctgttgacccggacgatcaaatatgaagccctggagctatctccaagttacaaatcacagcacggagtactccgtgtccgtggaccccttcataggtactgcaatgcaatttcttatttagttgcacttattacgcatttcccttttaatgtggttgtctttttctccttttttcccccgttttttggttccttattttgtgtacaaaatgtgcataactctcgctccttgcagatactgcgtttcaccaaccctgtttataaccttttcttattgtagtgtgacacatattcagccactttaaattgcgattttgtggtcgatccttataatgaccctgaaatataacactttcgaatataccccgaatgtcctcattcttaacctaccgagcagtacgtcacattcccccaacaacttttcatttaggtatcacgcttcaagctgcctttcctgactttgtctttttctttttgtctccctcgtcattgaccaactcctgacgccgaatcacgtagtagcagatcggataggtaaaatcaagaatcaaggtcaacccgatgtagaacttgcacatagggctctcaaaccaaggtcctgcagcattgccagtgaggtagtagatagtcaacttaatgaatccaccaaaagtagcgaccgctctcaacagccttctgccatgtcagcctcacgaaatgaagtgcctggcctgtaaacttaccaagtcaacaaggaagcaccgcgggtactattgcgggaaagaatctgagcaattggcccaagactcgccagtgtctggcatagcacacccccatagaaaaaccccaagtcaggcccaacctcccgcgcaaacgaatattgaccgatggcaaagccaatagtcactattccatagaggaagtaaaggtttcgttgaatgagggggaaatagtcccactcattgtgcgcatttttgatgataaagaagatgacgatgcaatggaccaaaaaccagactcgaactcctccttcccaatgggcactcgcctttgggtagataaaggcatagataaactcccacccaatgtcattgcagagggggaagatacctgtgctggggatcttgtctttttgcgaagtgcgcaacatgctgaaatagttcaaagtccagcaaattccagctagaattcggagaaattccgcgaccgacgccaaggcatctcgatgcttcaggactgcggagagcaaagtcgatttctccattgtttgtggtcgtatggaagatctcaaatgagcaggtgtgtcaacaggataataggaatgagaacgagtgtgtcctcaagtccaggacatagttttactttcaggggctgcgatatctggctggtggctagctgtaaactgcagaatggatgatccagagtacgcgtgagaatgcaaggactgatccaatcgacatttttcgtcagtctacagggttgaacgaagtacacaaactgcttccgagcataattatgctgggattcgtaattagagttgttgacatattgcccatcaccactgagtattgaaatattattttatgtatcccttgatcgtcactgcatatgctacatagctgaatgacatttcatatacatacctaggtaccataccgtacaccaaggcgtattttactatattgggtccgtcccgtgcgggccgaggcggatctaacgttaaatgatgttccaaggttagcgctatgtaagttacacaataccctaagccctgccgagccaagtagccgatctcacgatcttagccaaactttcactactcgtattactagtactccggacacactattagtttcgtttttgagtactccaatttacaaatacgtgtatttatcagttactatgtcctgtttacaggacaggtaataatcagtctgtaagtgctccgtacaaattcaagaatcaaattgaataatttgccagcaaagaagattgaacactgtacaccgatatagagaaaatctcgtcgatatagtttcgtgattatgctacttgaactaatgcctaactcgaacccaatttgtgcacttgttcctccacgtgcgcccaagcatccgttcgtagaacaccggttagccaccaattcctaccagcatctttcccgattaccgaaagaacgttgcggaatgaattttccgagtgctgaaccccatttacatagcttggctttcctttcttctgggtgttctgcgagcttgactgagcggagctttgtaacacggccggcgagaagtccatgtcaaatagacgggctttatgccagttggagcaagacagaagcatcatccgaggatcacccaccaaggcgagatagcccgtcttttccatcgtctgcatttgcagtgctgtcatcgcctcgacctgctctggagtccgctgttctgctacggattctcgaatccgcagagcaatttggcctaacggttcgtcggcaatctgctggccctgtagaaatgtgggtgacatgcacagtgcattgcccatgtatgcactatctttcgacatgaacgattcatgcaaagatgtccgcaggtttagtgcattgtttaccaggatagtctggtccgtcctaagccccaatgcaccgtagagactgcgcacccaccaccccaacagcacgtcactttcactcacgaaaggcactgtgcccccttcgctgcttgaggtagcggagatctcactcgatgcttgctggcggagactccgcaaacatgtggcgggaatacaaatggtgcgtcgctcctcctggcgataccacagtctgtcaaatatattcagtccgataaaccataagaactctttccgaccaaacacacggttgaagtgcatgtacttttccgctggcgtgcgttggccgagttgtgtgagcgggtctgatcggaatccttgtagtttgggaattgcctctcggttcccttggagtagagcggtccatgcattcaaaattgttgtcattcccataacatctgctaaggtgtgtagccatgtgatagtaattactgtggcgtcactgaaggtgataacgtgtatacacagttggggtctgtccgaataggtccagtcatcgatatgttttggggcatctgcgctgcgtagtagggggctcaattcatcgggggatggaaagatggcgggcgtgccggttgtatgtggtattctggccccaagtgggtggtcggcgatgcttgtctcatgctgagcattggtcatgctgaaagccggcctcgaggcatcaaaatgtgctggaatgtgatattcaagttttccatctctctattaggccgctctggtcagcatcaaacgtgtaagtcggagatcagtctcaaactacccacgttcatgcgcaatcgagctcccagctgtctccaatcttccatctcgagcagccgattgagcgcatctcgtagttttgatacatccaacacatcatcaaatttgagcgaaacgtctaacaccgtgccgcgcatacataaagcagtattccagaaatggagagggatgatctcatcgctcggcacggtagtaggttgaggtggttgtgtgctagaaaacaaccccatggttgaatcaatgtctgttaagagatagtgtttcaatggagaaaagaggcagtccaagcggttgcttttgtacagacatggtacgtataaaatcgtgtttttcaattcggatcttatgtattgaaaacagtagagcttcgatacatgcatacgagtgcatgtaccagtatgtatggatgtatacagccatggcgacgtattacctgttcaaatcaaatgacgattaacatacctaggtatacggtgtatacgatgtatacggggttgtgaattgaaagttacagcgtataaaatacagccacttgcaaatagttccactgtgtatatttcggagtaatgtattacaaacgcacacgacaaacgtcgtcctctgtcgcacgggtctcggtgtaggtttatgaatattccaacgggcgagggagcgaaactcccgaattctcagaacaagtctcgcccgagttacccggtctttactcccggcgaatcgatgaacccagcatatagatgccttctaagggatgcttcttagccaaagcatcgtcctgttcccagttgtcgaccttcaatttcagccctgtctcttcctgcactcgctcccacagccggttccaactagctaggtcgtggtaatagtatggcaggcgcgcattggtggcattcccgatggcttggtcccgacacgccacgacgcgacacacgatgagcgatccggccttcggagcgagcaattcaagtgccctctttgccaccttgatttgtgtatcaaagtcaaagacatgaaggaaaagcgagatatagacaatgttgagctcgcctgtcagctgagtgaccagagcagatttatcgtcgaggacatcggcatcaatgaaacgagacttgatggttgggcgatccatgaacaggtcgagcccaagctcaaggaactcaggacgaaggtcagatccatacaggttttgcgatggggcgccgtcatagatctggattttccgcatttattgaggttagccagctctagtcaagttggggaaagatgcaattgtcgcctgctattcatcttctcgacgcaactcaccaattgtcgcagttcctgtccaaacgcacatcccaggtcaagtagcctgtctcccttcttgacacggtcaagcatctctgggtagcagggtgacgatgcgatgctcagctcgaggaatgaggcttgtccaatacaggcgtaagggaactaacacgtagagaaattttcatgtcagtcaataacccttagatatcaggaaaggtaaactcagaggaaagcgcacaactgcaaaggcacggtctctctacatagtgtcagcgaatgttgtcgtttaagtttggggttgcgccacaaaccaagtctttcacatgttgcaaaatattgtccgctgggatcttgctgtacttctctagaatcgtcctcgctggctcgttgaccttagtcaactctgtactgtagaggctctttgggtcaaagccgctcttgacggcggtctcgagttgagaatctggatgcatggtgggtcttgattgacctaagggatgtcgaggggaaaatataggactttggggaaaagaggtattctgctatcactcaaacttgtcagaatgagcttttagtgggactataaagatattcaacaagccaaactcgttggggcatgtcactatgagattaaatacatgtctttggcgaatcaacgcgagaaccccgaatagtacaggctttgggtaagggaaatgcggtgtagaatggcccacgcagaaagaataacgaaataggaagtgaaggcaaatgcaaggaaacattccgaaagaatgtggacgtaatcggctggaagctagcgtaggttgtcgacgtatacatcatatttacgatcatgcgcacacgggatgtaacgatggtgagagtccacagactatgtggctggctgatgccgtgcattaatacgaagtactccgtagggaatgccaacttgacgtactcagcttcaggtatctctgcctaggtacggggtaggctggctcgtctattgtaaaccgacatcatgtccatggccgtatatatcgaatatcaagattgaaagttatatttgcaaaaagaatactctaaatattgtcggcctgactgctctagctagaagacgcacaattcacatccagcaaaccttcatcaacctaaatttagacgaaataagtcagtaaacgtgttgtcagcgttgcaccaatctttaaagtaaacttacatttgtgcaagtgaactgatcatccccatcggggctaacaacgtcgatgttactagccttgatatttgagcagacctgtacaagtcagatagggagttacaactggtgctgttcgagcacttacatcgggacttgagcagacaatcattcccacatcagggtcacgtttaccagaggtgacgcccttgaaattcttgaagacgatatcttcaatggcaagtttgctctgggtggcgtatgtgttagccgtcgacaaccagaaacgaatcatagcgctggtatcaaggtggaatgataggaaataggcacaaaggatattgatggacacgtacagggaactcgttgcagagagtcaaattcttctggccatagcactgggtcacttcgatggcatagtcaacattatcaatggtcatgccatcgtaagtaatgttctttaccagacctgatccgccgccgccctgtagatcggtcgacatcgcagcggaacctccaggccaaaccttgatacgcgcaccatccttcataagatcgttagaaacataatcatctcacttgtgggacgaaacctaccgatgcgttaaacatggaaatattgtacacgagcacgttctgcacgatatcaacctcgcccgggtattggcccagagagccaacagagataccgtgcgagccgttgcaatggaggttctggaccagaatgtcggtaacattgggcttgaaggagacgcagtctttgacattgttagtaaaggaagatggtgtctaatctttttaagggagctgtaccatctccattgttgatcacagagttttggataacaacattcgttgaacgataaaggtccctatcgacgttattagttaactgaagctagctcctcgtttatatggggatgaacttaccatccgtcggtgttcttggcctcattctcactgctactgtacccactgatatcaattccgtcgaaaaggacgttcgatgagtttgccacgaattgataccactgaggcgaataacgaaggttgagaggtccaatggtaccaccatttagcccaactataccaaccagaattgggcgcaagatgagggggtcctcagcatataagtcataccagacctgaccattaccatccagggtgccctcgccgtagacattgacatcctcaccaccgatctggaagaatgttgtggcattttggaagatttgcttgaatgaattttcttgccaataatccgtgtcatcgctaaattggacatgtccttggatttctattatggcttgggtaagtactcattcgtctcatacccaatgcgcattacataccgaggtccacatgcttcaaaaaagtcatgtcaagtgccttcccaatcgtatacttcttgtcggcatcgaagacgacctttcctccattgttgcattgcttcaatgcgctaagaacattggctgaatcgtcgcggccatcgccatggttagctacatgacaggtgcgagttctggcttggctgcccggaaggggcttgaacggatggttcggctggcacacctcgcttcgggagtattccttggcctgaactgcggcgctgagtggtaacaaaagcccaaaggcctgggtcaaggtatttgaaatcttcatcgtcggtgtcaagagaacctagaagctgttttagtggaattggcagtctcttcgactatagacaccgttcgggcacttccaggacagcttatatatagtctcgccataggcaatgtatttcctctgttacccccggtctgggggtgaacgctaagcacggccctttgcggtcatgcgatggggtaaccccatctcgttcaatttgctccggggaaacgggctagcgactccacgagatgtggggaaaccggggcatggtcatgacttgtttggtgagtttccgtctcgctggagagcggaccggagattaattgactggcgttgcgtaggcatggtccccaggcaagtctgataggaggaatatttgagcgatttccccgattgggaggaaaatcccggataaactggcaagccctaccagagtccctaaatccaatacatttcaaacaggcgaagctaacagcaccctaggtttccgagtaacaactatcaacggaggttagttggagttacaagacaaatgctactggaaattcttcggaattctcgaccatgtctcgcagaaggaactcaaccaatcactttgaaacatgctttatatgtacaacaactgtccaataaaaggaccagactctcagctcagagatgaaacagcgatcacctcaagagcgagcgagctcaaccccaagattcccctatagattcacctcggcgcaggtgacaggtccatatggatatcggtctagatgtaatcaggaacgctctttcaagctcccctgccatcaacacagaatatatctcatatctaagtcgacttctcaacagccttcttgacagtgccctcggccgcctcggcggtggccttgacggagtcaacagcttcatgctcaatcaccttggcggcttcgatgctcgagtcagactggttgcgctgccacatgaagatacgggtcacctggacggcaccgacgcatccgaggaagaagttcacagcggcgagcctagagttatgccgtgttagcattggtggccggcgggtctggtatccggttagacatacaggatgttacggggcttgatgatcaagcaccagcgagtccagatggcaccagtacccatcagagcagcgttctgggtgagggagagcttctcggcgggacgggcgaagtcggagataccggcgatgaccaggcaccactgtcatagggaaatacgttagccacggtgctcagtaggtacatggaaaagtctccaatatacggccgcgtgtattcggaagggtggctcgggatatggaaggcatatcaaatgagtaaatcgagttgtcgtaccttcattaccggggccctgcggagcagaagttagcattaatccatagtgcgcaaaacacaaaagatgtagcttagttggagctcttaccagaagtggacagtcttcataccaacagggctgttccatagacgctggaaggcgctctgctgctccgcagcaccggcttcggagctctgccagcggaagctctgggcacccggccggcggaatggcgcagaagcattgcggaatgcaaagcgagcgttgttcacaaagcggaaacccacgcgagacgacatggcgatagctgggatggttgtgctggtgagagagaagatggaagaatgtccggtgatcggtggaagggggagttttccgtcggcgagcgtagatagcgcaattaaccaccacaaccacagctggatgaatatatagtcaattaaaaacaaatggaatactctcaactaattagtatagtctattctaattaattattcatcatttactatctctcttgcgccgcaactacctacctatgacgcttcggcagatgtggaagctgatgtaagcgtattgcgctagttgatatcgggactagcgggattatggctctgcgcagcgaatcaacgccgtcgtgaataatgcactgcatcgcagactgtccagcaagtcaatcccactgctcctgcgctcatccccccgtggctcattcgagacctcaattttcctaacctttacatctgcctgaccattctgtcaccatgtctggcaagtacgttttcactcaaggcctgaaggagctccgcttcctcttctgccaaacctccgaagcgagcgcggccacaaggtgcgtacaccccgacccagggcgaatggcctctcggctcattgattgaccttcctccctgcctatagatctttcttgaaccgcgcctacccgactatgaagaagcacaacccccagactcccatcatgatgcgcgaggcctcgggcactctgccccgagtttacgcccgatatggtacgacaggacacctataagccattgtgtcggctctttagacaagcgagtcaagctaacgtgatgggtttttcttaatagctttcggcaaggagaagcaagaagcgttgtccggtaaatatcccccaccaaccataattttgcatcaaattgcaatactaattgatgtttctaggcctgtcggacacccagatcgaagagcgcattacacagttggtgaagcagcagctataaattcctttttgtttctctgcagatctattttatgcccccgcgttcccaccgtcctacgcccatcttctgtacctatagatgaaatcgaagctcatatccaaaacaaatccaattgaattacttccgtgatgagttgatgctatctctcacaacgcgctactagcattgccaacctcgccaaaccgatactgcgcccagctcatactcccctcggggaacgtccagatcctttgccccagatcctcgcccgcagcaccagccccaatatgaataggcagcaaatgctcaaaggagggatgagcctggcgtgcatctggtctcttcatcagctcagccatggccttctgtcgtccagccggcgcagtcgtcaccgcatccttgagcgcctcgtcgaagctaaccgcatacggcatcggggttgagctgccaaatgtaaaccgcagatcgcgcaggttatgcacagccattccagatacaatgatcaaaatgttctgctcgcgaagactcgcgactgcctgtccgagccggtagtgctggtctgggtcttcagtgttgaagagcgagacttgcaccacgggaacgttcagtgggtttgtttctggctcgaatgctgcattttcctcgtcagcattggatatcgtttgaatgcaaactgtcacataccgcacttgaagctagcccagacgccgtggtccagtccgcgctccacgccctccgccgtgatatcggcttttttcaacaatcttagcacttcgttcgctacctccttgctacccacatttgggtacttctctttatagtaatgacccgggaatccgtagaagctaaaaccccgttagttcggatttgcaagttttgggctaggattttgatgtgaacatactcataaatcaaatccgtcttttcggcggtattgacctggatcgtatttcgaccggcctgccaatgcgccgagaatacgacgacagccttcggcttgaccttggtggttatctcgcgcccaatctcaccgagcttgcggtaagccgggtgatcgacatcatacatgacgtttggctggtgggtatcaaatcagtatcaaatcagtcagatttggtccatggtaagaaccaggatatggataactcaccccgccatggctgaggaagtagatgggtgtcttcatgctgggctgtgcgtgaccagttgtgactgcgtctgactgacccttcactgtcgctgcagcagcagcagatgctgaagctgatagaggtactgccgctgagcgcgcggaagatccaaagaggcgacggagaccgaacagattggcggtgtctccccagagcagggtaataagtatagctgcgaggacggtcaagaaagagacaagagcgagtttctgtccactgaaccagttaggtcgtgtttccgagtcgttatgtcggcttgatccggaagacatgtatggcttgtttcgattagagctagcaatgtactaccttgcagcactcaacaaggccttattttatatttaaatgcaaaggtaagaaaagaaaagcacgtattatgtacggcactagagctgattaattaaatgctcttagaagcgcagagagccgatcatagggccgagcattggaaaattgagtggcagtgcggaatttgcccgctgagaacccatatatccgccctggagcattggctcggatttacggatacctgaagggacatcaggttatttcgatgtttggatattaatacattgtacaggcaataaagttggtcaacaatctattaatgtatacagacgctacaatcagttcttgtccgttccagtcatgcgcatcccattcgtaaaaagaatcaaagggggaggaaagaagagtgagagaagaaaaaagagcaattccaatcggggaaggccattgagaaaaaaaaagataagagggaataagaaataaagtaatcatgcaggtcaggaggtagaagagaagcgttcttgaccgggtagaatacaccaagcgccggtgaccatgaagggaaatgcaccatgcaagccaaatctaaagcgtggcaaatcatgaagggacgaaaatatccaatcacatgagaacgcagtccccgtcgctttgcttgttaacagctgatcgtgagagacgagtcttttgcattcggcttccacccttcttaaggtcttcgagacgttcacgagccttggggaatccttgagctgaaataaagaagaaaaaaggtcagctgtggttaaagcgaaaagcagtaaaatggaagtcaactcaccagctgcgcgccagtaccatctctttgcgtcttctaggttaggtgtagcgccgattccaacctcggtgaaatatcccatagcatattctgccttggcaagaccagcggtggcggcctttcgagcccacagataggcctcggtgtcgttctgctgtagaatgccctctgatccggtgagataccatccactaagggcgagttcactctggtgttcaccctgtgccgcggcacgagtgtaccagatgatacttgtgcggttgtcaatgggacatcccatcaggccgtattcgtaggcagcaccaagtctgaattgagagaacttgtaacctagctcggcagcttggtggaatagctgggaggcatattgctcgtcgcgcacgatgatgtcattgccgccagcgttttgatacatgagagcaagctcgtggagagcatgcgggttttcctcgtccgcacggtcagctgcccgcttgagccatgatataccctcccgggggttccgggcttgaccgagaagcccctttagattaatcatccccatcttgtacattgcaggtgtatcaccaattgcagcggcacgcttgtaccattgaacggccttaaatggatcacgtttggtaccgccaccctcttcctggccaatctcgcagcatactgccacacggtatgcagactgtgcgtgtccttgtttcgcggcagagtgatatagtgagaaagcttctttgggatcgacttcgagtcccattcggccctcaccgtggcagtcagccaggaaaaactgggcttcagagtacccggctgaaacaagctttttgagaattttatgcgcatcgagcacgtacttctccttcgccttggcttttgatttcggatcgagtctgctgttgtcccctactagaactgtggatgcctcgactagcttttgggcgagtagaagttgggtcttctggtcagaaggattggctcgcgcctgctgttgcagccgctgtatctcttcaattgtgacaggcgcctgagccgttccaccaggcaccatcattggctgcggggcagcgggggctgggatcgattcaggagcgctgtattgccgaaccggcgcaggttttgatgcttgatcgtggccggggcggaacggggctgggtggtgaggaagagcatcggggttctggtgaggatctggcatctcggcctggtcgtgggaatagactggctggttgttccggaccggggaagggccttgtgagtaaccagcgtaatcttcgtacccgttcgacgcatacccagcagagggcgggtggtcgaaagctggagcacgggaagtttctccaggaatatcaaactggaatcccgcattttcaaactgattggcaccagcaccgtctggctgtcggaaatttggttgagattgagagcgcgtagtgtccgccccgttggagggatacgcgtagtctccaggcgaagaagtcggagcatgcactggtttcttgaccggtgttgtttccagtcccatctcatcaatcagggcaccctgatgagggtctggcatggcatcaaaattaggcatatcgggttcatcaccagcgccaccgccagactcataatagctgtccagaaagtccttgggagcatatgaaacacgactggcaggctcgggaggaatcatcaaaccagcgggggggattatcaggcctgggtctatatcattgggggcacgagaccgcgggggccgcatacttccagcagtaccaggacgcataggaggttcgcccatggagctcgctgggtaatctgtttcttggtaagttgactggcccgggtagagcggtgcagctgggccgagcggcatcgttgcgcttctaggtggtggaggcatagaggggcccatggagtctggatagtctctatcaggtcgacctggtcttcctgagctagcagctcgcactggacccattggatagccacctcggccgcgccctggtggaggtccgcgcggaggtggctgtcgcatatctggccgtcttccattggaatttgaagtgtgcggtctaggcgggcccctgccattaatatccatcgcagccatatctctctctagccctcgaggtggcggaccgcgccgatcccttgggcctctagggtctcgcgggtctcgcgggtctctgggcgccctcggatctcttgggtctcgacttgggaaggtagggaagggattgtcgaaggcaccgcctgggggtggacgcgcagcagcttgaagtcggttagtacgcgctttgcggtctctgtcggaatttacatacgtgctcttgaccgcgattgtgggggcggtctcccaccaggaggatagccacgccgatcatcgtatccaggtcctgggggacgtccatttcccgggcctggtggacctggtgggcgcatcgagcgtggctgagattgtgcagcaggatatggttgcgaactggaggagctggactggtagctgtatgccgcatcgtcgtaacctgggtcgttctgctggtaactatggctactcatgccgccgtcgctgtatcctccgtgggagccatcttgcgaatatcctcctggcgatgccatagaaggcgcaggatggttattgtattgtcgcaaaggtggcggcctctgcgcctgatgttgctgagtgtatgacatagcgcaaggcgacagagcgtactacacggtgttgattcgagtagtcttcgagggcgcttcacggtcgtacaaatcttgtgggtagtcgcatgcaggggacagctcggtaaactccagggctccagggctccagggctacaatttggtgttagcacatccattccacgatccatggatatcctgagtcggcaacccttgggactccacagtggtccttacctcgcgcaatgccaaaccacgtcgaatgaccaaggcgcctgtcacaagctgatcgagcacctgagtaggtcaggacggtccaaagtcgagtttgaaggtgttcagagtaaatgaagcggggggcagaatgatttaggggcggtcggagcaggtgacctttaaattaaacagtgtttttgacccacaactggacacttttgcatatttctcatacactttacttaatcctttttttcatatgggtatccaatctccttttgcgcccttctagactaactactttgggtcattttctgggcttaaaatgggaatttcagtgccgtcatagatgaatgttgtatgttcctattattatattcccacttaggactacacctctcgttgatgccttgatacaatgtatagctgttatatacgtataattgcttctgaagataaagcccgcggttagaaatttattcatcccactcggtgcctgacgatcagggggggcgttcgaagatggggccgggccctgcaagtccatcacaatcacaatttcatcgctggcgggatcgttggcatccggttatgttttctcggtaactatactctgtaatgctggccatctgccacctgggtatccaaatccatggctttcagctgctccagtggccgcaaaggccggtcaaacaatgatgactaaactagaccatgtggccacccgcggtggatgtaatcggtcaccccttggagggatatccaaggttggataaacacgtcggtacctcggaggtatggaaattgtgcaacaaagtaggacatgagagcataacagagtctccacatctgtctcggaacacttccttaagacgtcacggtcaaagtgacaaaggtgataaaagtgtggggaggaacaagaagatgtgagacacgctcgatcgggcaaagcgtagtactgcgccacatcggctgcgccacgccgcctccaacagcaaatgaaagccgcgatgatgttgatgatcgccatcactctcaacgtctcaagtcatatctccagttatccgggaaccacatcgtcataccgaagccttgaatcggtaatcagcatccgcgtttcggattcaccatgtctcgcgccggattatgggcgaagaccatagccgggtaagtgatcctcgcccgtaccgcgacaaagactcctgctcacattcgcttctcaacatagtggccttctcatggtcgtcggtggccccgctcttgttgagtatatccggccctccgacgaagagcttaggaagcgatacaacccggatctgcagaaacgcgctgccgaacagggggaccgccgggcacaggaattcgatgactacgtccataagctgaaggagtggtcaaaatccgataagtccagtatgtgatatgcccgccatttaccctagagatggctctgcgggatcggttgctcgaacctgaaagtgcatccgagctaatagtgatgactccaaactttagtctggtacgccgctcaagaagaattagaccagaagcaagcagttttggaggcaaaacgcacacaggagaaggagcaaacgcggacacaacgggaggagatgcgcaaggagatgctgggtgaaaaatgatcctccgactaaacccccctctaccatcgatctgtgatcatgctgtgtccacacagaggattcggtctacctacaatctacctacacctcggaacctccgtctcccttgccattgactcaatcgctccttccacaagtgttcttttccatcccggggcttcggaaccccggagttcctacaccatcttcaatcttggatatccctgggtgtatgtcatgatttttattggctgtacgatacgtttgcgactcttctcccatctttgcatctaaaatctcaatatctgaggcttatatcaatgtacaactagcgacttccgaactgtgtttcttcaatacaataatataaagcaaatctcgttctattgcaatcacgccgcatatactccatacattggtcccccgaggtttcctctagggctgtgctcgaccagccaggtgctagaatagatgcgcacatctgcagcgggtagaccacgtcctctgcttgcctaccgggtctgcgcgttgcaaggctgcgtcggtaccactatctcgtcgtagagcacatcgttattaataagcgcgagtccgggtctaataacaagtggatttatattatgaacatggaggcaatgtcattgcctactgtagcattggggctcggcggatgccgctgcaggtcggtatttggagtaccaggcggcgaattccgtttgaaggctaccaatgccttttctttttagtgggttcatcgtcgttttcagcacaggttgtgttttgtccagggggtaccagatctatgtacattcatatgaatatggacacttctcccctacaacaaaggatattaatcgtcatgcgtctacggcctggaaaatgagcttaatagagccatttaggtaggacattgaataatgtgttcaactggggttcatttttgggtgcttggcagaaatatcccttgacccctatgggctaaaaccgcccgctaaatatgcaatgcgaagaagtatattttagtccaatgcttaatacgaccgcgcagaagactgcagaattcgttgtatgtaaatagagctacagcctttggggttggggcgtcaatcacattaatacagtgggcagagagatatatataaccggattcttcaacaccatcgccctttttttagcgcgcgcgtactaacagttagttggcgtcattgggtgcgccggccaaggagttgaaaacattgactaccgcgccctacctacaacttagccgccaacttagcagcctcctgacctgcaacttccccgataggattgaacctgtcccgtcccttatgattatttagctatgaaatgcaatcatgtaaaatcatgctgtccaactaagcagtattactggcttttggggtatgccgggttctggcatctttcaattgcattgtcatatatccccaacgtggacccaggctggggttaatggggtgtctgcttggattgtttctgttttgacaactgatatctagaccagatgacagcagccagcagcaccatgaaacccattatcaaggtatatccccaaaggccactttcaacgttcttgctctgatcatgaccaagtcatagaccagcagaagcactaccctctccttcagcgagggccttctcaatgaacttctccagatcgtcaatttcctcgggagtcgccgagtgaccaaggtttctacaaggtaggaatatcaagttagcagaccatcacaacccggaacatcagcgactaaaaacatactcatattggttgaaggaaacattctcaaggccaagctccttgagtttctgcgcggaggtctttccagaggcaaatggaacgacagggtcctcggtaccgtgggcaaggaagaacggtgtcttcttgttggcccactcttccggcaagtagttcttaatccggtcgctcaatagcatgtagcacgacagaccaaagacaccgccgagcttttccttgctagtcacaccggcgaatacggacatcgcaccaccttgggagaatccgcccaggataatacgggacgccttaatctgcttgttcatctcttgctcgatgagggtattgaagtaatcgcgggagcggataattccagcttcgtcctggctgacgaggaattcttcgaagtccaactggaaagaaggagatgatgttagcgtcgggggtttatacaaggagtttgggcataaaaactcacatcaccgccgagtttggagatgtcgtaccatccaggcatgggcctgccgaagttctaatttgtttcgtcaatatatatccaattaaccagagatatgaggctcacatacgactgtgattgggatgtcgggcgcattggggaagatgaaggccacctcgtcgaacttgccgcggcggcgccatgtctgggcaagggacatcctatcagaaattagacattgatggtcgggagcgaggctcatgggcctgagccaggtaatccatggggattttcataccatccggcaccgctatactcaaacattgttagcctcaacaccatcgtctatctgcttctggcgcacttacctatctcccaaaccgtgggccatgataacggtggcggtgtgtttcttgagcgccggaacaatgtacggaccacgagtcatcttgccgttcgatatatgttattagatgcaaaaaaaggaagggttggatgaaaggaaactggtgagattctcaaactgttgatttccccacgattctgccgccgaggttatcgccatctcaccgcccacttgataacagcatctggagatgaagtagatgaatttcagggctcatcaatggattcaatggatacattattaaacattataaaggctacctctaagtaaccacggccccatttaatcacaccacgtcaagagaatataactcctgcttagttgactcaatgacctcattgacgagatcagcttccacaactccttgctgccaagaaaaagccagcaccaagcacccgtctcccccagtgacagctgacacctcaatggcattacccatcacactggcacattgcgaaaacaccatcctcttgatagaaggtaggtcaggatctgtttgcggatccaaaacgccaacattcgacacctcaaagctcttctctcggtccttgccaaccttggacaaacacagttcctcctgaaaatcgtcgacaaactggagtaggcttgtgttggcatttttcccttccattttcaggacagactcaatcgtgttacgagaccgtctggcctctgcccatgggaaggacccgtcagacggcgcgactgccgcccgggaatatctctcttcgtagtcctggacccagacgcccatcgactcatcagtgataacatctggaagccagcgccggcttgagagcgcgccggtgcaggcgagcagcgtgaactcagacgggatgtgagcgaagatggagcgggcgacgatcgtctgtagcagtgcggtgatcgtcgtcctctcttgtcgacatttttccctgactgtgctgatgagtagtttggagaatggcacgagccgcattcgggtttgagaggggattaggactttggagccggtccataggcccgtgggccgtcgggagtagatttttgcctggaagatcttcttcgcaagatatgataaggaaagagacattgagtgcaaacgctcaatatttggcaacagagggagctgcggtgacttgatgatggatttagtctgctccgaggactccactgcgcctagggctcgtaggaaggttttatgaaaggctttcccggaggttccatcgccaatggcgtggtgatatacaaatgccactgtgaattgccgctcgtcctctatatctagcaggacgcagactctccagaaaggatttggagccttgaatggcgtgttatgctgggttgcaagcaaggtttgcaagtcaagatctggagtaggctcgccatcgacttcggtacttaacaagcctggttttctgtcctgaaaagacacaactcggtcgagattaatttctggcagccgcacgaagtaagggtcttgcgtgtgatcatctgccacgatggcggatagcgacggatgttccgcgattgccgcctcgcatgcctgataaacatagtctttgacaggaagcacgaatgagtctggcaggaaataagttgctgatactgcaacattcaaataaaacccaatctggtggcgcgacgttgaatattgttccaatcggcctggttggggtcagggattgttgactctcggaaaaggttgccgactgtttttgacggggatctgtctactcaccaacgggacgtagtatttcgaggttctccatgatagactattaccagcgcctagcaaacaatctcgcttgcttgttggatgtccagaatgtctgaagatagactggccctgatcaattcacttgcctgatttatgaatctacccgtgcacgtgacgccttatactatcccacgaaaggcattcttccactactgtaaaagggcaacaatgaaattccagattatacagatagttctcggcttgcaaggtcctcgaatagaagagagatggaccaaaaaaagtaaccgcgacaagaactagcctttagcaacagtgaagtcagtggccgggttagggccggcggttgggataccagacttcgcgggtaacgtggttataacatagctagaaagtcgacatttactgtgtcgttatagcgggaaacgatgggacacaagatctcattgttcattatgcatcgccaactctgggatcaaagggaaatagagtcaaatgtcgaagaatcagaattttacagcgcagcaatgccaccgacgagtgcagcaccaataactccccaggcagcggtctgcatcggcacagcagcacccttggaagtggaagaggacgaggatccgctctgtgcttgaccctcagcagtagactcgttggcattacgtgtagcagaatccttggggaaggcagtggcaacgagattggtgttattggcacaggcagatggtgtctggtacttgacgtcggaggagaattggatatcggagcactatattgcgttagtaccgcaatgaagagtcaaaatggacgaagaacaagtgaacatacagcatagagacctccacttgggtcaccattggtctgcacctgaagggtagcattcattccgtcggtgagattacggccaatcaactcctgattgacctcaacgtgaggaagacagaactcgccaaggccgctgaccttaaaagttggcgagaggacaatgttgaagttgtctcctggatcgttgcccagagcaaggaggatctcgacggcagtctggacatgatgcatttcaagagcgacggggaatgaaccaccggacaatggtagcttgatacgattagaggactggctcattccaccgcaggggaaatgggtcatggtatcctcatcaaaaccacgggaggtcgggtacatcagcttaaagtgtgcggaaaccaatggcacgatggccgtgaaggtgaggagggagaatttcattgtgcgtaggttgttagagggctggaaaggagtagagagataataattagaacgtaaattagacaggagtcgatgtactagaagagtgggaggactcagctctttgaacctttctatacgagttctgcatataaaatgtgagggagttagcgggacctgaaaaagacagggtccacccgcaaagtcatgttggatctaatatatcgggatatcggcaatcgggactttgagattgtgcaggcatcggaatcttcgacatccctacatatgtatcctgttcttcgatctttaggccccaaccctctcttcaatccctgatggcttctttgtgtcgctatgtctgacaattatacatgcgcatctaagcgcagtgtaatacaccttccgatttctcggcaaatggttgtatctcggactataccccatctaaaatggcatggacctgctgttttggtagctcggactttccctgctccaaaggtaaattaaagctttacgctagccctaagagtggatattacccagtgagctagtccaaatatggttagtaaattagctcaattgcgcgcgaaaggcttagtcatgtgattgcatgcagctgccaagtgccggagacagcgaaggttttgagtggaatgaagtggaatgaagggaaaaaggagatcgacgacgagaagagaaattcagagccaagtcaattcgtatcatatttaccccaagacattattccccaacgccagacagatgctatttaacgtcataaataatatcaacatgcataagatgtgtaagagaaagtcgaacgcaaaattcttagtgtctgtgctcattagtttgaatgaagcgtccgaccgccaattccccgaggaaagcgcctgcaagcaccgagcagaaatagccgatgttcatagtcatgacagctagcatgctagacgtgatattagcatttatccgaacaatgccggtagagattaggacatacagtagatatgatatgcccacaatgcataagaacaggagcgcccgcggtagatcaacgctgaaacgccagggaattggcccgtgagtgacgttgtgcacaactttgactgattcctcaacgccctgcgcagtgacaagtgatgcaattttcgcgtccgggtcggagtcaatgttgccagcttctgtgcctttgccggccacggtgatataccgtcggttgagatgtgtggcgagccagtggcgctccatggtcgctttgaaagcgacgaggcatcggtcgatgatagcgagaacaatcaagaaaatgcatgtgccggcaaagctacccgaggatgaaggggtccaagcattggagaaaagcggcgtgtcgtgggcatttttgaataccatagccatgctcatagagctcgatgaggagctcatactgtgtgaagtcgagccgtggctgctcatatccatgccttccatgattgataggcgagaaagtgaggtctgggagaatcaagagaatgtaaaaaggaaaaatataaaaacatgaagtgacgcattgacgcattgacgcattgccgcattgccgcattgggccacaaccttcgggactaaaacggtgcccacatggcggacccaccctcaggtgagcatggatgagcataatattggtaatccgccctgtcattggcgatgggagtatccatatacatccgagtgttttgtagggctcaatctcatgctttctattacaactccagcacaagatgtccatgtcaatgggtgacatgcctgcgggctcaatgtccatgggcgatggcgttcccagtctgttcaccctacagaagatgtactgggctgttgtgggaagtgcaatcggtgtagcaacccttgttaacctgctggatcgcattattgctagccatcggtatgtttaacctcaacatccggtaacattgactaacaataatcagcttgcgagattcttcactcacgcccgccaagccaaaatcactgttcttcaatatctatgccaccatcacagcaacagtccgcgaagttggctatgcaactccacgaccgctccgactgggaggattgaccatccatttcccgccacttggccgcgttctcatcatgctagccaacctggtggtagtcatggtcctttgtttctacaagctggacaccctagatccatggaaatgggagaacgttggctatcgcactggtttcatcggcatttgccagctgccactcatttttctactggcaggcagacagaacattattgggttcttggcaggaatgagctacgtcagcctgaattggtaccatcgctgggtcgcgcggacattgtggttaactgttaccatccatatgggattctggttccgcaattgggatcgttggcattatatcacacaccagctttataacgatccgttgacgaaacgtggatttgccgcttggattattctgacctttattgtgatcacttccttcgcgccaattcgtcgactcagttatgaattctttgtcatccagcatctagtcacctttgttggctttattgttgcggtgtggatgcatgcgcctgatgaagtcaagatctgggtatggatcccaattgggcttgtggtgttcgataggcttgctcgttacatctggggtgcatatgcgaacttggccattttccaccgaaagaacaaaacagatgccctctgggcacactcggctacgtttactccgctacctgggaatgtaacctgcgttactattgaaaaccccggtgtccggtggcaacccggtcagcacgtcttcctcacctgtcactccgtcgctccattgcaatgccacccatttactatcgcgtctatcccagaagataagaagatgaagttctttattcgcgccgagaatggtggaacaagacgctttttccggtacgcttcgaagtgcaatagtctattgggggatgaacaagtggcggggatgtccgatacgacagttttcatcgaagggccatacggaagcatccggcccttgcgtcagtttgacagtgctgtactgctggcaggtggcatgggtgcgacattcacaataccacttttgcgggacgtggtgttagcatggaagatggagagcaacggcagcaaggagcagattcccaatcgtgtcgctcgtctaacagccacaaagcggctgcgttttgtctgggtaatcagatctcgttctcagctgacttactttgactccgaactgcgtgccctgctgacagacgtggctgagtgtcgacgcacacattcaagttttgagaaggagattgagattagcatttatatcacatgcgacgaaaagctagatccgcctatctctacgtcactaccattgcagacacagcctcccactccgctggaggcttttacgcaagacgagaccaagaacatatccgagaaagacagcatctcgatttatcctgcctctgccgacccgacatcgaccccaggcaccgtcgtcacaggtagggggtgtctccctggtggagactgctgttgcactactcagatcgaagaagaagatctcggcactgcctgtgcatgtacctgttccggctcagcacctgttcagtctgagaaggctgctctggatatgaaaccccttcgatctgaagatcccacaaacaaaacaagcatctatcctagtatagtctctggccgtcccaagccacgaactatcatccgcaagctcctggagaaagctgaaggggaaagtgccgtggccgtgtgcggaccccgtggcttatcagacgatgtccgccggagcgtggtttctctgagcgatgaacgagctgtgcacaagggaacaggtgcgcaggggatctacttgcacgttgagaacttcggtttatgaaggaagaaattacaacctagaacttgttcttttattccctgggtatgttcaccttctggagtaatcaagacttcggcttggcactgcctagtatatgcagccatggctaaggcatcctttgttttccccttcaaccttctcggtcaggctctccagactaatgtctggaatcgggcctaagtccttccaattgcccgactcgtcccaggagaccgaacatagatgcctctgttcccggaatttgggtggcggagggcctagcagggcaaccagttctgtctgccatatgaacccggacatcaaatacaccatttgtatttttgccattgataagggtgcgagggctaacgatgtcccaggcctacatatgccaaaattagcatttctagtaaagccaaagttaagaataatgccactcaccacttcgtaaccccagttcgactttcggatcacttcaggagcgctgtaaacgttcggcatgatatcatcattgtgctctttatcacccaaccgagcttctccaaaatcagtgagcagtggcagcccaccttttggaacgaagtccaaagacctgtggattgctcggtctttgagcacctttctaggtgatggatttgtgacttcagccccttcgaatcgggaaagctagcttgttcccggtccaggaagcagtaagttcttcagctgaatgtctgcaagagttaggcctacgatataatctgtccagggaatgtggtgtattaccggtgtggatgatgtgacactctgaatgtaggaaatctagggagataagtagctgccggatagctggcttcatgtcatcaagggccattgcctgccctggagacaacttgacaataatatctgcacccgttagagatgttcatgaacaggacagatgtgacgaccatgagggcctggatataaaaatggtcgagaagttggcgaatgaagtttctgcctggatggttagtttccttcgaattcatgtgtgtgcagatgtgcagctctcgctcgtggtcctgttttttggcccgtcacatagactttcaagacaacgtacgttaatgtgctgtattatatgttgatattagaatcaccatcatctggatagctcgaagtgtatcaattgcacctgcgtcaagtctttcgcaagccaaaccgttgaggttactccgtaccctattttggcaagtgcttgatattgattattgagtactctcaccctggttgatagggtagtatttctccggctagtatgttggcaatgtctcctcgtcaagctcgatggactggtcaagcaacttggatcccgcgggaaagtctctcggggtgcatgtccattgttatgatgacttgactattcgatacggcacaaatgttgttcaccgaccagacggtaggaaatttcgttgacatcaagaagtggaaggtagagacatagtcaagcccctgcgactaccaggggtacaaataccccatgcgtttcgcgcgggtcgctgcattctggaattgagcgcagaagctggccccaaggtaggtcgagcgtgtcggtgaaggagatgatgcaaaagacgaatctgaacggagagccaagtccaagggggtcggattccagggtacctgcatatatatataagtgggaaaatatgtgtccgaatatgaattcatgcaggaagttaagcggcctaaccacacggattgaaatccttcatttctatggacctctacatctctacatctcttttatgaaattagatacactgcgttgggctagttaagcagtatgaagctgttccgacaaggtagagttcgaggtattgagacacgttcaaaatccatttcaagatagatagagatgccatcgctcaacactagacgccagactccagatcatagaaaaaggttatcctccttggcatttgtcaagcagtccgtcgcgtcgctcaaaagagaagctgaagttgactcattcggaccaacagccctggagcttagcccgagacgacccgagccagcacatgacatcatccaggaactgagctaactccaattcttccacctcccgtccacagcctctatcactccaacagcttccattgcaagaatccaaaccgtcaagatgttccgcttcgtaagttcgcctcggaaattcccaccaattcatcctcccctaactcccaaaccactaacacaaacagagcaaaaccctcgaccccatcaccctctttcactccccctccatccaagcatcaaccagaaccctcaacatcctgaaacaagcttccacaaccgccagcgaaactgccacagaagaccaggctagcgatcactcccgccactccaagcaacagcgcggcgagttcgagctggaggttaccaccgcacccccgacaacagaccagcttcgcaatatcctcgactacatctcgcccgtcagcggtgtcggtggtccgggtgaaaaggtgacgtatggtgtcgcggagctcgtcaagggcgcccgtgatgcggaggatgcgttgaagaagttcaaggaggataatacgaatttcgtgaggcctatcgtatgttcgactttttcctttcttccatcgccatgttggagtcctgcctagatgtgctttactaatactctactgtacagaccgttgactgggtcaatggccgcgctgtcattggagacgaccagtccgagatcctgcgcatggtgcgccagcttcctgcgaactagaacagtcagtgctttactgcgaggagatctatgcggtacggatagtctacttggattcgatcacgaacgaaatcaaactcatattccatattccatacaatgcaaccattactagcagaagacaggaactgcgccatttttggtctatggctgtatcatacaagaatcggattccacaactcccccaccgtaaaactagttcgagtcgaaaagacgtatcatgttgcaagttgcaagttggaaataaagttgaagttaaaacagaagagaaaagacgaagggatgagccattaaactcaatactgggacacctggcacaaggaaaccaagatccagctcggagtcccgcgcgccaacggaacgtaagaagagaaaaggtcgacggaatatgaatgtgaaatctggattttggtcaggaacctagaacattgtcccgaacgtgccatccgtcgcgataggcttccgtggtgaggtgcggccgttgctgtccacggcgggtttgcggtgactagagtggtcagtaagagaacaacagtacaaaggaaagccacccagcttggtttggaccagaacataccggaatgtaaatccgacaaacaagcccttgcccatcttatcatcacgatcggccatatcttccagcgcgcgttgcttatcgtggacctccttgtactttgccatatctgcttcattgctgaaatcgtcaaagtacccagcatcagtctcggaatcaagttcaggcacgaacggagcccgttgctcccgcagactctcgaagtcgacctcggcgaaatagtcatgcgcatgaatctccttgatgttcttgaaccgctggtctttcccagcaaccagtctcgtgatgagatcccacgtgcgccgtgacaagaagtaattcggatcctcgtacacgggcttccgcaacaccttctgccagcgcttcaggttctgccatgtctcctcgactgttgcgcctgcgaagggcgggtagcccgccaatgcctcgaagagcatacatcccaagctccagtagtccacagtgaaatcgtattggtcgcccttgagcacttccggcgccatgtaatctggcgatccgacaatcgacttggcatagttaacttctcgctggcgtagagactggtagccttgtcgtcgctcggccattgtacgttgttccatgggccgaccaaaggggacgggcgtgttcccgacctcctcaagcttaacacgcattgactcgatcttgcccgggctcagcataccagccgccaggccgaaatcagtcagcttgacatggcctgtggaatcgatcaggaaattttcgggcttcaagtcacgatgaatgtatcccagcacatggagtgcgtcaatgcagctgaacatttcggcaatgtagaagcgggcgtgacggttatggagaacaccggtgttattcagcagcgtgcggaagtctccgccaggaacatactccatggccaagtagatctgtgtatcatcctggaaggcatagagcagcttgactagccagtcgctcttggccgcagtgagaatgtcgcgctcggtcaggatatgacgaatctcatcgagcttgaaaagcagctttttgctcatgactttcaacgcgcagacttcccgcgtatccttcttctgtgccagatacacctgtccatacccaccctggccaacctgagtcagaatctggaagtcgccctggcggaggcgtgtgcgacgtttccgcagatgtgcgcgctcgcgaccgaggtattttaggagggcgggttcgtgctcgtggtcaggggtagcaggggggtcggggtaggcggctttgaattgtgcgtggcgggtttggcgattgtggacgtagctgaggagatcgaagtagtggtcaaggaagtctgtcatgcaaagtcagtcaagctatatcttaagattcttgtgctgggccgcacttacagagttgggtcacattgacgaggcgcttgactttgggctgtgctagcttctccatttcctcgggggtcaggccgcgcatctggacctggcgtttcgtggtctcatcgcgtggttgatatggttcctgacgcgaaagggctgcagcagtcggggttgatcccagctccttcgttagacgcgttgggttggggggtgtgttctccttgttggctctccgcgttgggctcgaaggggtttggtggataacgctctcgttgaagtcctcgccatttttgccggcagagaacatgggatgattgtagtggttatatgtcgatttggaaggagaagtgggagccaacttcatcgccttgtcgaagacattgggtaggtcgagtgcgcccggaggcaatcttgacttgcttgggctaccctggggggtttgtgggggactggtaaagccatcggcaggagtggaggggcgatcgaattgaccacgggtatgcaacaggggtggtggattcgggagtcgtagacccagttggtcctctgaaataatagccatggtgttgatggaggagcgatagaggggttggttgtgaccccctgtgataaggccgggaactagtacccaagaacaaaggcaaagtgacgaaggtgtgtccaagaaaaagaaaacaaggaaaagaggaaaatgccttttgtctcgggaagtattgaaggcttatgtttattatttcaaaagtcgatcactctccactaagatcgaacggatcttgattctcatttctacaatccacacttccatcccgcccgatagttatccccttcctcacggagttgctgtagcaactcccacgtcatacaccttgcaaacccgactagatcccacgagagtggatgagtttatcgaggcgagctgaatatcatctccacttccaatcgctactaactgtgctttgacggttcctcttaagtgggatcggctctagtatggagtcgaacatgaaaccgccactggttgtggtcggacgcactgttttttgacttttgcataatccaactagtgaatgtcgcacgtccaggtccgtgttcggggaataagcaataatattccggtcactgcctatgtaggcacatgggcaaacctgagcaccataggggttatgcataggaatcttgaagctatcgcaagggggggcaataagcagacttcctgattgggaatagttagtctaccctaggtaacacagctgaagtgttccatggatgggaggcacggggaccccgataattggcaatcacaaccatggaacccaacaaatttaaaccgaaaatgaaaaaaatcaatttaatttcgagctcgtataagatcctacggagtataagatcctattattcacagagcaccctgcttccgttggccagtctgatttcattagtctcacccttgaatgggattctgatctgagccctggggtacccacaaagaacgccagcccatagtcatccgtcgtgaaggtgattgtggcccccttgggaaaataaaacacatcgcccggagtcgccgtaaccttctggcccgtctcgtctgcaatttcaaacttgccctcgacgataatcttcatttcgtcgtaggtgtaagtgtagacgaggggagtgcccttttccagtcgataaaagccgcatgacataggcttgtctgggttttcgttctcgctgttagtttgtcagcaaaattgcctacctaggtacctacctatctaacgcactatgaggttagccgtacctagattggacatcacccaggaaagcattctcatttgcgataagcggaggcttgaaggtagactgcgccttggcgtggtaggtgaatggaagtgccatggttggtcgaatcagtgggaatgtgtataagaatcaatacaatgtttaatagataagagaaatattccggtcagttctcgaggactacctctcctttatatcgatgtagccacagtctgccattgcaaagaaagaggggatgccattgagaacccaagcttcctcaaacttagggcaactcgatccgaacaaaaagcgacagtcggatctgatgtccggaccaggcagtccaacggagaacttgtcgggagaaagccatggacagattgagggacttgcgggtggtgaggggaaactttgaagcttgagataaagtcctttactaatggagaaaaaaccaccgacaacttttcatagtattgcttaactggataaccataatctcatagactataagcctacatcacctaataatacttggaatggtttatggatatacagataggtgctgagctgggaggattcctttacttgatgcggttagctctttccatcaagtccgggagcacatgtagaaccacgtcactgaccctctaatgcttggcataatatgttcgtagtaggaagtactacaggcacagacgcaagatctccgaacctggagaaatgaaaaaaaaaaaaatgaaaagaaattgccagtcgtctgtgtaaggaagtccgggaaacatcttgcatattggtgtactatattaacaaggtaagagagcgattttaagcctcaatgccccactccatctgcatatagaaattgggatgtctctggaagtgcccagctacatataccatgaatatttctcaactaggttgactttcctcttatacaaagccttggaggtcatgtgaatatagaccccgtgctttatctatctcccacattgctgtggcttcgaaggctcacctatccaataccagatcttcaccgctagttcttctcctcacttttaagccgcatatatatacctaatcaaacaaaccatcattcgatcacatatcctggtcaacatggcatcgcaaatttcaccgaatcagacgggaatcgacgtcgccgagcgtttagtcaacagctctgaaaaccccaacagctgcccttgcggctggtatgtctactactcggctgtctgtggacacgtgtaccaggaggtcaagcaccaatgcggtgcgtttcagagcgtgaaatacgaaagcggaaataaaactagagcgtctgctcgaggtaggttctgcaagaccccggcaccgaaaaacatcgtccagggtgtgcagatcaacgtcaagtgccagcattgttgatttcagtgttcaagtaagtgatacacgttgccaattacgtgggaaaagacacactaaaaagtaacgttagccatatccctcctggagactcttcgacggatgctcgggaatagtgcattgttagaattggaatgtggcagtgaggtttgggaggccatgagaggatcattccaaggattatacacaggtgtacctggggtatggcgtatactggtagctgcctactgtattatctactctaatcggctatccaagaattccaaggttgtacattggatggtgaagtaagatcaaagtaaaattaaagaaactaaagagaaagtcattagtatagttactatgtaagtagtcaaggaaggcacgactgtactaggtacctataaagccttaaaaacctcctctctcccatcttttctctaggaaataatctctcagccagaccttccacatacacaatcaaatacaagaccatctcggaaagaacccgatcggcgactgaggcaaacccaccgagcaggatttgccagattgcaagaactgcttaagggttcaataccttgtgaataagtgggaattctaagtgagatcttatgttattccttccacaattgtagattttcgcgtttccaattgacacggtagagaacggaagtactatactcggctgctaggaagccgtcagcgacccagttcaccgggcatgtatgaccacaatgattgatttaaatttataacatgaacgtaaggaagatcttgaaagatctgatattaaagctggtggaaagcccggcaggtatttcagtcgccgaatggtgattgatcaggtcgatcggcgattcagatgcatcgcttagacacggatcgccgtcctatttgtttcagtcttcagcatttgaaacccattttgggatcgtacttctaaccagttctcaaagattgggatatcgaaagagctgggtcgcagacaagtcgaagtcatgaatgtccctacccaggaagcatttaccatggccaatgtgccagaggctccagaagatccgctttatcggttgatgagagagtatcggcaagataccaatgaaaaaaagattgacttgggaattggtgcttatcgagatgagcatggaaagccgtgggttttgccggtcgtcaaaaaggtctgctttcctgactccgagcacgccccagttgtgtttctgacatgacagtgacaggccgaggcgcttcttcaaacaccagagttcaatcacgagtatctcccgatacgtggcctggactcgttcttggccgcagcacagaggctgatgctcggcaatgatagcccagctatccatgaaaatcgggtatgcactcccaagcctaaattaaggaaacagagagagataagggcaattcgcatggagacacctgctgcgactgttttggaaaccggacatgccaactgattctcctaggtatcttctatgcaaacagtatcaggaactggcgcagttcaccttggagcgacattcatctctcgtttctgccgtggaacagaaagacccaaggcattcatatccgatcccacatggccaaaccactaccaaatcttcagccaatccgagttcgacgtgcaatactacccttactatttggtagaatctcaaaagattgacatcaaggccatgatcaggtgtctcgaagaggctccaagcaaatccctagttgtactgcaaggctgtgctcataaccccaccggactggatccatcgcaagaagagtggaggcagattgcagatgtcatggcagagaaaggtcatttccctttctttgacaatgcctatcaaggcttcgcaagtggcgaccttacccaagactcatgggcatgccgatacttcatcggacggggatttgaatgttgtgtcgctcagtccttcgccaaaaatcttgggatgtacggggagcgtgttggtgcctttcactacatctgttcgccctcaccagatgcctcgcacgttgcggaccggatctctagtcaactagcaattcttcagcgagctcatatttcgaatcctcccgcctatggagcccacatcgctagccgagtcttgaatgaccccaaactattttctcaatggcaacatgagctgggcattatgagcggtcgtctgacgaaagtacgtgaagaaataaggtctaaactcgaaggtcgagaaacaccgggctcatgggccttcctctctacccaaatcggaatgttcagttacactggcctctcgaagaatcaggtcagactgcttaaaagtaaatggcacatatacatggtgagttctctgcttctctacgccgtcgacacgagctgatagacccgcagactgagaatgggcgtatttctgtggcgggactgaacccaaacaacatggagtatttcatagatgcggtcgatgatgtagtaagggcttgtccatgagaaattggagcaatgttcgtgttacaattctgctcctgtgctttttcctgagtaattcatatggttttcaaacaactctcacaacgtacagagtctccagacacggtggtttctgttccttataaagctttttcaccgtttatctcgtactacctcggcagaaatcccttgactcagcatcaggaagaatgcctacattcttgaaagatcggagtacgttactggacaactaaatgctatcagatgagtctttcggtctgttccagcgaaattgtcacaaaaaaatagcctaaacatgaattggagagaatgatgccagctacgtgaccttgatccgattatttattgtagaattggaattcatccaggccacgtcctgatggcaccataggcagagataacgcttttggagcaaccttcacctccagaagtgctgggccggaggtattcagcagccatccaatcttgttatccatgtcatcgatctcggagcaactttcagcctgcactcccattgctcgagcagcttccacgaagtccgggttgaggttgtgactatgacagaatcggttgctgtaataaaccgtttgtaggtgcgtcaccatcccttgctcctcgttgttaagaagtacaactttaacatcgataccaaactgacttgctgtgagcaattcgctgatggtcatgttcaatgatgcatccccgtcaatatcgatgacaagagcctctggacgggccacttttgcgccgattgccgcaggaagtccgtaccccatcgtaccaagccctccagaagtaaccatggttctcggatatctccatcggaaatgctgggcagcccacatttggtgttgtccgacgccagtagtgataatcgtgcgctctttaatatgttccacagcatcgctcagtcgctctataaaatgctgaggcagaatcatatcattgttgtgaccactttgattgaatgctcggaatggatattgatctttccaggcctggatctgcgtgagccattcaggccggtgcatcggtacagtataaggtaacagaagctcaaggctctccgcgcaatcaccaacaacaggtatcgtagcttccaccactttgttgatattcttaggagagatgtcaaaatggactatcccgccgcggccttcatgcgctgccagccgtgcttgaggcgcgaattttgggatatatccagtaacccgatcatcgaacctagcaccaagtgctagaatcaaatccgcgttctggatagctaaattagcgtacccagatccatgtagacctagcatatgcaaagatttaggatctctttcgtcaaaagctcctagaccttgcagactagtagtaacaggaattgacgacttatccgctagctcctttaagagcctaggcccatcagagcttgctagtacgccttgccccgcgtagatgataggcttttgggctgtatttataaggttggcagcctctttaactgctataagaagttcctgtcgtcgagcgtctttgatggccatagtggtaacaggacgattctggggacgaattgccatattggtcgggacttttgatagaatacccgcagtgacatcaagcggtagttccactagcaccggtcctggtcgaccgctggttgcgatttcaaaggcctctctaatcctctgtgccagctcttctgtcttgcgcacgctgacattccacttggtgcacggctgggacatggataaaatgtccgcttcttggaaagcgtccgttccaatcttgtctgcgctaacctgaccacagaagacaaccatgggagtgccatctgcgagggcatccatcattggtgtgatgaggttagtcgcgccgggcccggatgtaaccaggacaactccgggcttcccactgacgcgcgcatatccctgtgccatatgtccaccaccttgttcgtgtcgaggaagtgtgaaaccgaaggatttggcttggtggattgcatcgaacaccggtagtatgcagccacctgggtagccgactgtattggggcacggaaggcgttaggcgcaaaacgacaacaatcgaacgggggtcacgaacatacaaatgtgtcgaacatcatggcgtaccatcatttcgtggaaaatctgaccaccggtcttgccaacgaggctacagaaaacaggccttagtcacactgtttgtatagttttagaacgtcaggtccttcacttacgaggcgtctgtggccatcctggaggcaagtggcctttccacttctgacggcgtcttgagaccagctccataggggtgacggtcgttcctgccattgatgcttcagaagaggtcattatcggaatcgaatggtcaatccttgcttacactttcggaatagcccttggcaggatgttaggctcaactgacgagactaaagcctcggtcgccattgacgaaagacgcttttttggaggatgcgtgactgcatgtttagccagggcagagatcccttgtcgaatgaatctggccatggtgatgtcgggaggaaatcaggatgtttttccctttcattcaagcaacggataaaaaccatggggataataaccttcctgtggtctagccgggactcgtcgaaggtaatagttaaatgcaaatatttatagcggccgtaaataccccttgggggccaaaactcatacttgaatgactcaccggactgactggattgactgatcactccaatgcacaatatatgtagatggtccatagaacctggttacattaactcaattggcctctagtttatgagtgactcacttgccttcgcactcacattcatggataggactattggttcaacgacgccgtttcgacacggatgttcttgccctacaaatcctgtccggatccgggaggacttcctgtgctttgctattagtccagtatttcttcttctggttctgacattcgatttcgcccccgtccaattttgtagtgaagctaccctaaacacgtaactattgcaagcctaatgaccctagtaggtttcggttaagggtgcgttattggtatgctaatattgattgacatattggtagtttgtatcgatgccgcagctcaccacaattctaacgatgataaagatctatagttcatatgagatgctcagttaaaatgccaggaactctccatggaataatacctaggtacctaggtagtgatcgctatgagtaagcttaggtggaatcggaagcttcggcatacttggaagatgaatatgtatatgcttggtaatttgaccatttttctttacaaatcacagagctaaaaacatcgatacctacctgggtaggtaggcgtggccatataattgagctatcaggaggtctacctacctaagtatgtaggtagcgctacgaatttgactaaccccagtaatcccggtaaccccgggacctcgggacccataatccccgatgccgatcatatggaggaatataaatacttcgctccatcttcaagtaaagtccggcctcatatccctcaacatccttgttccaatttctgcaattctgaagtctacctagttcccaaatagcccaacactctttctcaatcccaaaccaagatgccattgacaatccatcaccttggccgctcacaatcagagcgcatcgtctggctcgccgaagaactcggcatcaagtacgactttgtcttccacaagcgcgaccctatcctctccccacaatcaatcaaagacctgcatccctcgggcaccgcaccagtgattgaagatgacaactctccctttacaaaaaacaaggtcgtgcttgctgaatcaggcgctattatcgattacattattgccgcctacggggaaggccgtctcgcgcgcaccccgaaggatggcgaggaatacatccacttcctggagtggtatcactgggcgaacgcctccctgcagccggccttcttccgtgtactgatgacccgccgtctgaccagcgatccagaagcaatgcacgtcaagatgggcaatgcgaagttggagtgtgcactctcgatgattgaggcgagacttggtgaaactggagcctacttggttgggaatgacgtcaccgcagccgatatcatggcaatctgtactctcaccaccatgagagggttctgccccattgagtttgatgagcacaagcataagaacatcctggcttatcttaagcgtgttggggagcggcctgcttaccaaaaggctatgaagatctgcgagggtgaggatttcgtgcctattcttggtgcaaaggctgagcagtttgtattcccttactgagatctggattttatgcacctattgtgaattatcctgtacataaatgtgaacttctacctaccttatttctcataaatctcaacttacaaatcagccatgggcgagtgggcctcttgggcaataatggcctctaggcctaggacaatgcccatagctattcaccggaatattgattgtggtttctttcttgcaacagggtcgactccccaatactccacactggaaatgagcatacaatggttataattgattgtgctggtcatcaaaaactctaaaattttgatcgcaactttgcccatgtgtttggctgcatgcgggtaaccaaacccagcctaggaattcacaaagttcagtattatttcgtccaagaccggtatttaagcggacttccttctcgggcaacaagccttagaggttctcctagctgatactaaagccgacagcactttccagaaagcagcattagcatataaaacacacacttagctgagtaactaggaagactgaccggatatcgcactcagggctaaggcatgctgcatcaggaaatgggtcaacatagagtccacccaaggatcccactaaggacatagttcctcagggtgtaagggaagccagagtcttgctgtaagaatcggggaatggcctttctgaaaataataattcccggaatatttacatgttcgcagtaggggcggtatcggtcgaggccttgctgggtaacgcctacgaaggcaaaacgtggcttactgctcgcgctggatgatcaaggtcggtaggtgggttttccgggcatagggtgtgctaaacaccgacagagctaataatggccgaaggagctgatgtatcgggtaaatggcgcaatgaggatgatgtgcctagggctttgatagcgctgaaaatggttccgtattaccgaaaattcgaattgggtgaccgtgaggtgcgtgtgagcagttgcttgagggctttcggaatggggtatcgcgtaggtattttggaagctgaacagggaacgtggaagccattgaatacccatcatggtggacacataagttcctaaatcagccataattggtagtcagagagtagatcatggttgcagaaaagagtttcaatggaaaaggcaaaatcaaaagcattgtcataagtcatgaacgagagaaacagatccctagacgccgcgctggttcaaggcaacaccgattcagggctgcaaagtacaattttcaaccgtagcgcaaataaacgagaaccacgataatgagggcataatagaaatcagagcaagaacaacaactcgggctgcttgctttgttagccatcatattagtacaacaggctaggatgcgaagaatagtaggttaatttcgctcggcgcccgatttccatcaacattcgggtcattgctgtcgggctagccaatgaaaactatgagttgcagggttagctttggatgaaacagtctgacagttgtcaagcccaccttcccatccccactcccccataacattcacccagtgcaatctgccacgcacagttctttcaaattcaatgttttcaagcgacgcgagtgcggaaccccgtcgcacagaccccgatgaaggctgccccgatcttcctccggttgagcccttgtgggaaccactgggactgtatttgcggaaatcggccggcagggacgagctcactttctccctgtctccggatgaaaatgactcagaacgtcgcgaactaaccatttcccgctctcttttggcattcatagcgtcacggcgttcccagacttccttcaatacctccaaacagcggtctacaccacctagcattaagcgagactggattgtagtccatcgatccaagacccattttcggtcatcgtcggtgtcgacctcagagccagctgctagtagagggaacatctgtatgatactagtgcgagaggtatagggaacagtggcaagcaagatcagaaccctcttcgctaattcgtcagccggctcggagggtatctctggaacggcctgatgcagatacagcaacgtagcccagcgatacgcatgtgcaacttgaatgctatgttgcacctcggaactggggtcatctggtggctcaaaccagcgcggtggctcccattgctcgacaagggatttgagctccatagcttgagccacaacggacaccgtgttcgacgagctcttccgcacttgctggatcagtttcgccacgcggctcatgagagggtatagagtggtggcacatcccatcaacggatcgatatcatggacagtatcactcggaaggtcgaagatcgaagaatcccagttttgaggaccacagtcatccaaagaggttagtcgtgcaatcacgtccatataggaccatgtgttgtagagaaagcggatgcgatccagatgttcgtcgctagcacctcctcgcgttccactcgcgatgacttgacacattaatgttttcgcacctcgcaaatgctgaatgcatgtgcgggtgtgttggtcccaggtatcggcaaatgctagcgccaaactagtggccaaagcagcatccggcctcatattctggatttgtccaactagaccagttatgctctggcgcatgtgctttactccttggagccgaagatgggggttttgcttgcccgagtggaaagccgccagagcaaagatggcgtggcgaagtacaggcgtgtctttcgctaacggccaaacaagcgttcgccacggattctctaatgcgccatctttgatagataaaatcccacatgtgagcttatcaaatcgcaatacgagcatttccgggctttctggcggtagagatgggttctctgacattcttggggggttgagatggaaataatctccctgtggtatggtgaagttccaaggtcccagtcctggatctgacttccggataatctcctcaatgtcatcattttcatcctccaatagctgggagaagctcagcttcgaggcatcgacagctggctggtcgggcccaaaaggcatatgcctagcacgatcagcatcgacatcagaaatcaacgagttcgcgagcgacagtgaatcttgaaaaggctccaaaaaggagaggaaattgaaagggggagagtcggcagacaatgaaacattgacatcaaggggaggctcagtgcaatcagccatggaaacatcgtcttttatgacaggtagatcgtcaagcgatcgagcttcagtagacagaaagctattaatactagtaggcgagccatgcaaaggagaacctggaggcgaacgagagccatcaaatttgtgagactgcatgcgaatgggtgatgccgactgttcagtcgtcggaggagtcggaaaggtctggccaatatcggcgacagacggagcttgttgggacggattgtttgctgaagaggatttgtgagtatatcaggtctgacccacaaggcacccgtgacctcttacctttcttggctttggttacagtaggccgcccagaagccaagttggtctcttcgaatggccgccatttgaagtctttcttgtatcctccgcattggacctttcgcctttcgcactgatgacaggacggctttatttcgtcgcacttcaaccgctttgccttacaggtgatgcaacctatacaagtggagacttgagtcaatatggtggacagcatgaagtggccatctgtgtttttctttcttcgctggtagaaagatgtagttgcacccacggacaatactgtaacttaccattccgactctttgtctgttttggcttttgcgtccgaatatttccccgcgctggtgccgggttgtcgggcggatctaaaatcgatgggaatttaatgctttccataccaagttgatgtggaaacccatacacacggaagaaagcgaggtatacaaaagtatggagatgaaaatagagagataggagatgatgacggcgaatggtaagtaagataggaaaatcctacggagaggagatgataagccaatgcgggggtgccgatcttggagaagtccaggtccaggtgtctccaggtgttctccattacaatctcaaccgggttgggcaccggatatatctgattaattttacatcttgagctcaaagaacttgtctgtcattaccaccagagtgcctactagaagatatttatagacatccctgaatatctgtgggtatcactcaatataaacaataacaacatcgtgcggggatcattcaacgtttctccaacggcacttttaaggttacgggtacaactatcagctgtcacgaaaatttcttttacgggaaaggaaaaatggagggaaagatctttcattttaaaagaaaaaaaaaggaagacaaacggtggctgacacccccagccaaggggcgcagacacaaacagtcctcacggaggccactagtaccgttgccggtacttgttggtggacggggcggccacaggaaggcagggcggcaccacgggaagggaggggaccaccaccgcgagggtgggcaccaccagagggagggagggaggcaccggcaccgtcattggggcaggcggggcggagccagacacgggcccggtctccgcacagacatccatgtccggggggatatcccggatcatggtgtccatgtagacaccggagacgggcccaaattcggtgccctccatgggcatgacaccgtccaggtccccctggacgggcgaaggaggatactcgacatcctccattggcaggaggatgttggcggcggcgggctgcagctggccggggcgggtgtaggagctgtagggctcgaagtgagcccacaggtggaggacgagggacttccactcgtcgccgacgcccaggttgtggtggagggccgcagacgcggccagggggcgggagtggaggaggttgaggaggtcgggggaggaggtgggcacctgggctgatggcaggttagcgtgcgtcatttcttcaatgcttgaagaggggtacttaccagggtgtggcatccctgcccagtgcaagccgaaccacgcaaactctggtgcgaggacgacacggaggaggtaggattggggcgagccggcccccacgacaatgaccatgttgcataggagctcggtcagctcccaggtcaagacggacatctcgggctcagagcccgcggcaaacagctggtcgaacagggacatctcgtcccacttcagaagagggccagccaggtactcgccagcgagtacctggaggccgctcttcgagaacggaggcatggtggccagcaccatctccgaaggacaaaaagcagaaacggaaaagacacaagaaaagaagggaggggaggcggattaacttttgatttacggagaaagaaaaagagatcagatggaaggaatttacaggacttatgtatgtggctaagcagtgccaaacctattgatagttgacttaaatagagctcaagattgaatctaatgtgaatgtctgtctgtatggagtgtcatgtgtgttgagtgatgccttacacaattatctcaatgagtttgtctgttgttgaacaatataggcttgaatggctgggcgttttaatagaatctctgaatagcattgttcaatcggttcacttgtcagtgtctgcctgccttgacccgatctccgccttatggagtatatatgcttattattcgtcactttgaagaatgatctgaatctcccccattggttattttgatttcatgatcatttcaattgtctaaatagcccgatcgaactaagggcgttatgtatcatggagtagagtgttttattgtcatactatgattgtccaattacattcagaaagaagggtcaagtgaagtgacgttgaaatgaggccgaaatgcaggcaatgtaaggccgaagtgagagagagtgatgtcaattgaaattgattgatataaaggtcaatcataggccacagtagtagggatatcccaagcacactgatgagaacagagtccacccctatatcgttcagcatagaggataataagttcgtattcatccagcactatacagaaaacagatactaccacaaagtgctggagatttgggctctacatatagccagggaaactgtgaagaaataaaatcatccttggagtgactgactcaagtcagacacaaataccttcgagagtccgcgggcaatactaaatccatggctacggatatgtaactgcaggtcttgaccttgggagctctgaagccccgaataatagggtaacttgcttatagacaagcctagccttgcccagacaaaatgtactaatgcagcatatcgtgataagggataaggacattctcacttgtttcgcagggcatatggatatcgtagactttgggaggatattgcccacaaccaacataattttgggtggcatgttgggatttacggacgctgccaaagccgaaggaaagatcgaggcacagcgactgcacgtataggcgactgaatatcatgtacgaagtagccatgttgtagtccccatgttgtgtagtcgaggtactcccgaggtccacccgtggaccctggccatgattagtcatgtagcgaatttcggacttccggagtggcggggaaaccccagatgttcacggcccgaggtcaaccgcagcccgctgcccttattttgtttctcaattccctttctttactttctctctgtttcaattcaccaattacttgttcttctactatattgtcagccatgttccgttcgatacggcgtttgcctcgacgcgttcccgttgtgtctactgtttcttcacgttcattgcggcctttcacaagcggttatactcggatgacgcctgtccaacctcccatatccaccaccctcccctcagacgcataccagctcctgtccacacaagagaaagctggtgcatctgaagatgcgctttacgaacagcagattcgcgatgtggaatcatggtggaaatcgcctcgatacgaaggcatcaagcgcccttacacggcggcagatgttgtgagcaagcgcggctccttgcaacaaacatatcccagttctttgatggcacggaagctttttaatcttctcaatgagcgagcagctgctggtcagcctgttcataccagtgagttttggccggctgaacttcaattgtgacgaacctgacctcgattctgcacacaagtgggagctatcgaccccgtccaaatgacccagcaagcccagaaccaagaggttctttatgtctcgggctgggcttgctcttcacttttgacgagcaccaatgaagtatcccccgatttcggcgattatccctacaataccgtcccgaaccaggtccagcgtctgttcaaggcccagtccatgcatgaccggaaacagtgggacacgaggcgaaagatgaccccagaagagcgaaaggctaccccctacactgattatctgcgaccaatcgttgcggatggtgataccgggtacgttaataatcgcgatcgaacgcacgaagtgttattaattttctggatgcagccatggcggtttatcggctgttctgaagctcgccaagctatttgcagagaatggtgcggcggccgttcactttgaggatcaattgcacggcggaaagaagtgcggccatcttgcaggcaaagtgctcgtcccaatgggtgagcacatcaaccgactggtcgcagctcgattccagtgggatatgatgggatgtgagaacctggtcattgcccgcacagattccgagagcggccgactgatcagcagcgcaatcgatgtgcgtgaccacgaattcatccttggcatcacggaagatgtggaacctctggcagagactctccaggctatggaacgagagggtgcctcacccgaagaaattaacacatttgagcttgattgggtcaagaggcacaaacttgttacattcgaccaaggtatgtttattgattctgtggtgaacgatcccatttactaataatatgtagctgtcgatgctcatcttgagtcggagggtgcttcacagtcttctcgcgatgcgtacaaggcctttgttaagaagaaccccgatctttccttctctcgtcgccgtgcgctggcgaacgattacactaaaacacctgttgtctggtcatgcgatagcccgcgcactcgggagggattctaccactactctgcagggttccctgctgcgaccaagcgcgcgaaggagtttgctccttatgcagaccttctctgggttgaaactggtgacccaaatgtcgagaaggccggaacgctggccagcgaagtgcgggcagcgtaccctggcaaaaagcttgtctacaacctcagcccttcattcaactggatgggacaaggatttgatgaggcttccctcaagtcctttatctgggatattgccaagcaagggtaagtcgacattggatgtacctcgctggaattcgctaacttctttcagatttgttctgcaactcatttccctggctggtctgcacaccaacgccaccatcaccaccgaactttcccgtgcattcaaggacgagggtatgttggcttacgtccgtcttgtccagtctcgcgagaaggagctcggtgtcgatgttctcacccaccagaagtggagtggcgcgccttatatggatggaatcatgggtgctattcagagtggaagcagcagcagcaagagcatgggtgagggtaacacagaaaagggtaagtcaccatgcgttattccgagagaaaagttcaaattgctaacaagagaccctaggtttctaattccgatctaaaaaatatgcattggcaactgtttatttgtaattggcgagtattcgatatttagatacatccgagtccacagatgtcacaactccttttgatttatgatgcgactcacatgtagaacgttatagttactagtcctcataaagatgcatagtgacaatcacatggttacatggtaaaaaaagaccgtatcatcctgtatcttgaccccccagtttttgaaggtattcacagatcctctatggcttcaggagctgctaatgctttcattttcattgggtataatcagatgtcggattcctttcatcccaagcagatctcggaatctctcctgtaggaatgcaaaccacatgaatgcggccagcattcacttcctgtttcatccaaagcctgtttatatcaacatgtcgaggcttcgtatgcatggtagcaccttctttcgttagaagatcgatagtttgctgattatcgcatgcaatcgacaatgcatgagacgttttaaaccctaagggctcgaggactcggcgtcaccataggaccgtttttcctgcctcggagagagccaaaagctcagcctcgttggttgacgttgtgacagtctttcgtcctgaagctttccagtcaatggggcccctgcagagcttgcatatatagccctctgagcccttccgatctctgttgtctccgaaagatgcatcgcttgcgaattcaacagattttgctgcaagccaggctgcaattctcatctgctcgcttcttttcaacaaaggccttccattcagggtctgccttcatagctctgtcccatgctctcttcctctgtggacgaggagctggtttatcacctggcctatcttctggatatgcagcccagcatctccatggtgcatgtctcatcttactgcaaggacagtttctcttctcaattggaagatcagatgatttcttaccagatgatttactagctgatttgctagctgaggtgcttccaggttgagcttgttggtggccttgccaggtcggaaacatagcttttgacatgcctctttgctgcgcaggcgtaccgtgggtaataagccaatgggctctataccgggtaagtagccttctgaaatcagcctgtttttcttcctggcttttcgtactagcagagcttgtctctgctaactttatccagacaacaaaaaactcaggtgacatcactgagatagccaataggaattgggccgaagcctcgctatcattggtgatcccaactttcacgcagcgtttttgcaaggtctgccaatttagcagccattcgtctatgtctgtgtctttgtctagaccttgatcaaaatttctccatgccgcacgaaggcttgctttatacgtcgggtcacaatcaggtgaaaaccactgacgcagatacctaagcagcccccatggtgtctcttggtctagaaagacctggtatttctcatgaacgctttgacgaatagcgtttgcaactacccacctgccttgcagcttcttctcgtatgcgctgagctttctcttatactgcgtatatattaccctccatatatgataccaatccattggatgatccctctttaggtccttccaactcggcgcgatcggctcttccggaagagcgggttccgtatctaattccggatcacatagatcccaaacctcgaactgctccgcaatggttttgataatcaagagccatagctcccagttcgatgggtcctttaaggtgacgtgacagaacgaattcgcggagagagtgtaatccgacatcgtgagggttcaatggacgttcgcaaattggatgtccgatgttgttggtaatgcttgttctcaagggtttatctcaattcaggtgttgttatctccatgcagccaggagccggtataagaccaggcaaaagatgggttcaatatataaggttaagcagcagatgtgaaaatgagatcaaaattgaggcgattccgggctcgtaactgacggaaattaggtgtatggcgagcgtactggtaaattcacgatggcaaaattctctttaaataaatccaccatggtccgaatttgataatctgcccccggcgccccggggccgtcggacgtgcttaataagcaaaatgcatagccctggagtggcaaagtcacatatttacacggtaaaaacgccagtatcatcctgtatcttgacactactactaatattgagagtctccgggtcttagacttggtgaggctattctttctccggatgccgttccaagggcagtcatatttagtgaaaaacagctagcgtccaactttcgggcaaggttaaccagtccacctctttcatactttatcccgtaggcgacttctttttggcagaaatactgcctcgtcaatcaattcaaaccaatttcgagacacgcagtctacttgcataccccttccttatcttgaacaagttgctgcgtgacaggttagtcttttgaggccacgacgcttcggtaaaaggcaagaaaacataccagacagaagccgctggcacagttccccgcgctgccatcggccttgcaagggtgtctggcaggaatctggagaatgattagaggcttaaatgccatcgggatgcccatttgttcgaacataccacaggagcaggagcgggatgagccttgtctgcagccaaagcagcgccgataatggccataaaagcgatgaagatgaaacgcatattgaaattggaggaactatttcttgatttggagaacgtcagacgtgaaacggtggagggataggcctaactcaagctcagcagggtgatggtatttatattgctttatgggccctcttgttactcggcatatcaaatgtgaagatgtgactgggccggagaaaaagcctggtcaggtacgtttttgcttagaatcctcttgcccatctgcacgtaacaaaagcactgcattaagtagtcgactcgagaaaggggttcgttatcttgttgcattttggacgttgacttctacccctggtgattatgtgcttcttatttaaaatcggcccaatgtcatattactccagacgtgccacggctaagttccttgcacctccttcctttctgtttgcctttttcttcctaccaactcgaacctttctgcgcgctacgcgaaaccgcatttctagcgatcgtgtttgaagaggtatggtctcatgatattggccctagcaatgtgcacacggtttggatagctcgggcattgatcgagtagcatttcagtttagtccacacaggtatttgggcctttaaatagttcgagtacactacattttgaacttgttttatccttcattggaggctatagattgtgacacaaaacaataaaagggtgaggatttctgcaaggggatgacacttctaatgaccgtgcgaggtacgggtatcaagggaacagcactgtcgaggtaagctagttacagcggtcctcctgaaatggtcatataaattgagtgtcagccggaagactagaacaggatctgtgcataggtatggaaatgaaacgttgattttattaaaattgatgataagtagaaacatttcaaaatctaattgtacattgtgtggttgggcccccttcagaggtatcataggaccaaaacaggtcgaatgtcgaatgcatagatcagcaaaatgccaaatagacaaaaccattggtgtcatctaccaaaagctcacgaggagagaataaacaaacagcgactagagacgaatgatacccgccaggctggtaagggccttgagcagagacagtcaccctggaggtcatcaaattccgataaacaggacagaggcaaacagagttgagaaaagcatgacagccttcaagctggtatgggccttgggaaaagagacatccgctccagaggtacttgtgctagttgccgcgctctccgtcgaggtacctgatgatgtcttgtcggcagatgacggcgaagaggtttccgatgcagtcgggtacgaggtcgccgttgcagtggcattggtgtctccgtgacaccacacgtccttccaggcgacaccggctttgtaaaggcagtcggtaagatcttgaactgattgatccacggccagagcgtagatagcacaatcgtcatcataggcagttaccccagccgggttggcgcattttgaaaggagtcctttgtacttgtcggtattggaaactgcacatgatgcatctttcacggggatttcgtactgggctgccgttccacaacctgcgctagttgtcatagctccggttgttgttgtggtggccatgattttggaccttgagataaggaaaagccagaaaaaaaatgtttcgagaggtaatttcgacttcaaattcaatcgggggtttattgtagcatccctggttcgtgtaagcctttatagtcatttgggctttatttgtggaccgttcgtttaatgaatcacagccttgggagtgttccggctatttttagtcggccttgtcggtcttcttaaaaccgccaaggcagatgctacaccatcggtagataaggaagacatgtctcctactgcagccacagacatgggtaacataagagcaaggcgaaccgctctataacccttcttattctcctgatctctgttcttagtggattgtaagtctgagtcgggctgagctcttggtatgtgggaggcccgacacgcggaagtttttagctcataaatcacacgctggcatcagtttcctggacaaaatgcacctcctattgcccatatcgttactactactgcccttgaagagtaaagcaatgtactgtagtcggagcctttcttgaaacgtgaaattgtgctgtcgatcagttcgcaagacgtgagggaccgaacgcgaaccgctatacgacagcccatttatcagagccatttgtggtctgtgagagattgaaggcaatcttgcgtttgtgggttcgtatcgtcaatttcgatgctatcaacctaggtggtgggcggccggaaccatcccatcagctaccgttcttggatactgcgacattgaagtcgttgtgatcggaaggtgttaattctccgtgaactatctctatactcatcgtggcgtgggacggcaacaccatatcccctacatgggcagcacgcaatttatatctcccgtatttataatgcacgaagagaattgcgacccaccataggtgctagttccttcctgaatatcatgctttcaggcgcggaacaaaagaagctacagcagactgatcagtcagaggggttactggtttcgtgggaaacaacgtcgaaattgctatctaccgagtgagcgcagtagcgggaagttgtctttcggttcagatacttgtctctgagcaaggtcatcaggtatatgcaattcttttactgcggtcaaaaaaggagagaaaggaacccggccgtgaaactggcaaagatatggtaaagatatactgaagacaagtagttagatgaagataaagagcactagatatggagatggaaaaataccagacaaagaaggggtgcatatagagacatctgaaaggggtgagacagtaggagaaaggaaagacgtagaagcttccgaatgaactgtcaaccgtatgctttaagagatggagttgggcccataatatagaccggaaattcgagttctcggatgattgtctgaaactgagtaacagggtcatattagccatggcccagataattatgaagagttagaatatttccctatttccatatttaccttggattgtccaacaagaaatgccagcctcaagctaagcttgtacattctcttgatgttgcagacttcgaagctcgaagtgatctcaaggggcagtcggctgttggcccatatggtatccctcaaactgaccgttgtatttgtaggtgcatcttcaagacctattggatagttcatgttggccatactttgcacgattcgcgtgctagtatatgaccccggtgtcccttgtgctttcacttgtgtagtttcaaccagcatggtttgaaatgcgctcagcaggatattgcaccgtgaatgcccaagtttcgtgactgttatactcaaagggatcgagttacccaggagaaggcaaggtccattttggagctcggtatcgattctgaacggtaagggtgaatcatcgtcgaggatgtgggggttgatgctgataaagcagctctgtttaaagggcttttggttcggtatcgggtctgagaatgaatggaatataatatttcgagtcttgataatgatcagcaatgagtccaatgcaatgttcgttgctatataattgctggagaaaacgggcagttgctaaccttttccactgtacttttcccagaaaccacgacactcagagaatatttaatctcagccaatgactccgagtcccctgttgagggcggagtcttcctcaacaggtgggattttcttttgggccaacacgcaatatttggacatgcaatttgcggcttgtttgaccagtgaccggttttgtagcattcgatagcttgtgggacctgaacattcagtcaggtacagccaggcaaaggtgcttcaggtctttggttgatactgaccgtgatagaaaaccggagaatatgatttccgcctccgatagttacactggaggtgtttgaatcatgcatcaaatggtctgaaggaaaaaggcggtaagacctttggaacagctgaaggttgttaatgacaaatatcgagttgcaatggttggtcactttttccacatacattatgggtttccgtacgtctactttgagtcagccgagaagttgctgttcctgacaactttaggaagattgttgacaagtcggccggcgactcagtttgcaaaattacctcgcctgatactttatcttgacaagtatagactggctctgtctggtccaatctcaactccacttccatcggtgctcgggagagcgcaagtgaactcattttgaacaacatatggaaaatatgttaagaggagtgttatattgggaaagtcataaggagatcttgtacatattcttaaaagaattcaatcttgccattaaaaacctcagtacgtaaggaaactccactgcatgtctcacttcaaagtgaccccagatttcggcgcaatcagaattgtgtgccttatgggaattcacgggatttgagttatttttagccggttaataaggcaacttgaatatgttgaaatttccataaaatcataagccctgcccaggtggacagctggagtgcctgtaatataataatatacctaggtaggtaggtagggacatagtttgcgcgttggttgaaaataaaaagcgtgttttaacctcacgctaaggaataggacctgccatttgattggcgaacccattaaagaaacatgtggggtcccggcttaaaatagccgcttatagttaatttctcttagagcgaattgaagtgctctggtttgttattctttcacgttggctgagaaatgggaagaccctgaacattttctagttttaatcatatcccatgcaaagtagctcggcttacctgtacagcctgtcatactttaatcaattcggaccggcttggcagcagggatttcagggattacatctcggactttcagcttacacaccccgagtacttgttccacatttggtccagactgatacacaatggatccttttggccgagcttattcatatcgctatgcacaacaagctgatgaaagcgacggcctgagtgatgttcattcgcgtcgggtaagtgtatatgaagtggaaattgcttgatctccggacatgcggcaagccgaactgactttcccatccttgtcagaacactggacgcccaaatgaacacgccttgtccttactccactcggccaattcttctgccttgtctatcagttcctccgaagacccagtctattccagtgaacgtcgaccgtacacatcttcatttgctcaggctagacgcccgagaccagattccatggagtcactcgatctccccgatcagatcagactacacaacctttccaaccagggctctgctgtttcctcttccaaagagtcggggacacgacagaaggggagcaccatccgtcgatacccaacacggcgaatcaaattgacacaaggctcagtcttgagtatcaactatccagtaccgagccctatacgcaacgctatccagcctgagtatcgagatgcagagggggaactttctgaagaatttacccagatgagatgtcagtatcacaccgatgtgccagttgactctccccgttcatgataacctgacctttctctctttttcattagacactgctgcgacatgtgaccccgatgaatttacgctacgcaatggttacaatctccgtccttcgatgtacaatcggcataccgaacttctcattgccatcacatactacaacgaggataaagtactgactgcccgaaccctacatggggtaatgcaaaatgtccgagacattgtgaagttgaagaagacagaattctggaaccgaggtggaccggcatggcaaaagattgtcgtttgtctcgtcttcgatggcatggatccatgcgataagaacacacttgacgttctggcgactatcggcgttttccaagacggcgtgatgaagcaagacgtggatggaagagaaacagttgctcatatcgtttgtttccccatctcccaagccttctggattccaattcctgggaaatcctcaaatgctgacggttcctagttcgaatataccacacagttatcggtcaccccgaagcaagagcttgtgcgcccatacaaagacaaccctatgaatcttcccccggtgcagatgatgttttgcctcaagaaaaagaatgcgaagaaaatcaactcacatcggtggctgttcaatgcatttgggcgcatcttgaatcctgagatctgcatcctgatagacgcgggcacaaaacctgggcccaagtctttgctagccctgtggcagactttctacaacgacaaaaacattggcggcgcctgcggtgaaatccatgcgctgcttggccaccgatgggagaagctcctcaatcccctagttgcggcccaaaatttcgaatacaaaatctcgaatatcctggacaagcccttagagagcagtttcggctatgtgagtgtactgccgggagctttttcagcctatcgttaccgcgctattatgggtaggcctcttgagcagtactttcatggagaccacacccttgctcagaagctcggtaagaaaggaattgacgggatgaatatcttcaagaagaacatgtttcttgcagaagatcgcattctttgcttcgagttagtcgccaaggcgggcaatcagtggctactcacatacgtgaaagcgtcgaaaggagaaacagacgtcccggaacgaccagctgagttcctaagtcaacggcggcgatggctgaatggatcttttgcagcatcgctatactcaatcatgcatttcaaccggatatacaagagtgggcatagtattattcggttgctattgcttcatgttcaattggtttacaatatctgccagttggtcatgacatggctttcactcggtaagttgatattgccccttaggtcttagattatcctatgccagaccactaacatatactagcatcctactggctcacaagttccgtcatcttggacattgtgggaacccccagtgcgaccaacaaattcaaaggctggccgtttgggaatgatgctactccaattgtgaataacctgctgaaaattgggtatctggcattcctgatgcttcaattcatcctagctctcggaaatcgaccaaaggggtaagtatcaggacctagagatgggtactccctttcgcttcatagctaacctccgcccacagatcaaaatttctgtacacgctctccttcgtctatttttccgtggtccagctctatctcctcgttctatcattctatctcgttgcgcaggccatgactcccgaaaatctcaagtttgatttcagtcatggtgtgggggcatttatatcgggctttttcaactcaacgggtgggcttgttctgattgccttggtctcaacatacgggatctacttccttgcgagcatactttatgccgacccttggcatatgctcacttcgtcatggtcctatttcctcggaatgccttcttcgatcaatgttctgatggtctatgcattttgcaattggcatgatgtttcgtggggaactaagggatcagatgcaccagaaaagcttccatccgtacaaaccaagaaggagaacgaaacgccttttgtcgaagaactggacaagcctcaagtcgacattgacgagcagttcgcatccactgtgaagcgggccttaactccttggcaagaaccgagccagaacgaaggggtggcgcttgacgattcatacaaagctttccgaacgaatctcgttttgctgtggacgtttagtaatggtcttctggcattgtgtataaacaacctcagcatcgacaggctttgcctgacggtaagtcgacttcaagtttcttcgtctattgcttacatacactaactggtatagtcgacatctacaactcgcacagcgtggtatttcaagatcattctgctgaccacttccggtctctcgattttccggttctttggggcattgtatttcctactgagaaccggagtcttattctgcgtttctaggcgttgaatcaagactcggcaccgtaatgaaagggttcggggttgtagaggcgtgtgttgggtggtaggctgatttattgggcgtatttcgatcttggaagactccatatcttccgagttattactttccctgtttctttttttttctaacctttcctcagtgtttgataccatgtttgatttaatccgagaatcaatactgaataatcctaataagcgcatggcctaaagtagataaatccatccgaagtctcgccgaagttccaaaagggggttttaccgtgatttacggccaactggagagtatgcatatatgtgcagtagatatgcggacgtactatatacctctctagggattttaactgaagtactcactcagtacgcctaaagtgctgcataattaataaggacttatttggacaatataggatgccaagaagccgggctcattaacgcctattctacgccaaaaccggttcgcttcggaaattttctgattcagtggactttggtttatttttaggacttgagcctggacaatattttactccactctcatagagtaaatagcttcttcatttcgaaatcaaaatcaactatgtcgacagagcttccactggaaaggcaattagtggtacgaatctcaccagagctgaaaccaacccaacttcgatactaatggcaaccgcagtgtgacctctgccattcgcgcaaggtaatagccttcgaaaaagatgttatatatacaatctgcaatttactgagcagatacacaggtccggtgcgatagacgcgatccatgcggcaattgccaggatgcaggcatctcctgtaatcgtcggcgggctgtgaagcgcaagtgtctgagcactcggcccaggggtagttactcccccaggtcttcccacagttcccgacgaagagcaatgcctgatcatcagtctgatcaaggtaactcgacggatgcagtcttaccagtactccgctccgtcccaagtcgtaattttaacgacctacgtggacacaaaactggggttttgtacgatccggtatatgatgcgcagatcacaattcagcatcaactatgtcatctaccgggtctcactctagacagacgcagcgtgctcgagacagccttgtctgtcataagagtactgtctgacaattcgagggcactggtacaagacagtattaaccatcaagtggaagttcaccctcgaggcccgtctattgagttccttacctggatgttgaaaggtacaccgacgtttaaccatctgaatgcgttgcaaaattgacactgaccatggaactctagatcttcggactgacagatttggaactttcgttgcggattattttagacatatttcaatcccaaaattgaagcagatgggacttgaacttcttcgcaacaacataccgattcgcgactctgtcatttacaccgtttgcgtcaactccgttgcctacaagtttatcactacggtggtaaatcttgaagaagactccgacgtcgccctcgagctgaggaagaatgccacggggtatcgagccgcagctcaggccgcattgaagcagatcccactgttaatacccccgtctcttggtctattacaggctatcatatgtggtgtaagcccctgaacggtgttgttatatcctttctcgacggaactaatccatatacagatatttcttcaccaagggtctggagacgttgacctaagtggggacctcaccaaggccgcatgtaacacctgcattgacttggatcttcaaacgaaagttctgagtggaaacgcaagcgaggaagagcttttctgtttcctttggtgctacactttggacagaaaccatgcattcaaatcacgaacttcacgctgccttctcgatgttcagctacctcccactttcagcgatctttatccaactgaccctcctatggccgagcatttcttgatttatcttgatcttgctcgggtgcaggatacagtggtctcatatttacccgatagctcatcaagtcaccacaatccctcattgttacatggtactggagaatacatgctgctacagatgcaatatatcgagcaaagaatgaaccacgtgagtcaagaacatctcttttcctttacgcacagatttctaaccgatgaagatggcttcattgtcttccgaatggaaagggctcgactctcagaccgaaatgtcggcgctgaagttcgcctatcaatccatcatgaccggaatcctatacctcctccaatccgatcccggccaaccaaccagctcaaccgaaagctaccttcaatcggcgcgccgggagctctcagcgctcgtatccatgtgtcactcggcagagaagcaaaccgcggtcaactttttgaactggtgaggacccaccatcgataattatatgtttacctctctaacatgcacctcaggacaattctgctctacccagcgacggcatacttgatcctattctgcaacgtcgttgcgacatccgacatcggcgatttcaacctcatgaaagctatcgctgaatgcctcactcaagctggaatcagttaccccctggtgcaattacgaacactctaccagaaatttctgggtctttctcaggagtttttcagcgatgagcgcaatgcgatgcagaggatcggttcacctcagctgggaagtccgtttcctaacccggttgggagcccctttgctattacatggggtgcagatgatttgcttttcgaccagttcgtttttactggagcggaaagcttctctggtatgctgagtcttccagagattgatccatctctgccgtacagctttgattaaggggtgtataatacttgattgtgtgttcgtctgtagagttgggatggtgtctttgtattggtggcatacacggactttcatgaatatatatagcatcaaaattaattcttcagtttctatatataatggtgatatacaacaagtgtctatgaaatattcaaagttatgttcctggtatgtacacgtatataccgttggtgtcaagtacggtcttgcggtacatgacgggttatatatcccgttctatattattccaaaccgaacgggatacgtttcaaaattcaggtatctaaatcatatctccgtaaattcgaataatacttgcttcaagaggatatatatgtatggatagaagcagtcctcatgcaagcgtacaatatgtagagttaccaagactttttgtatggggaggtaccacgaaacagaagggaaattaaatccaggacgacgaccattcctatcgttgaaaatgactatgtggaaatattgcaattcaaaagagagtttacctaaaaaaccaagagtcaaattggggacaggacatgaaaagccgagatcaagataacaagaaacatctcgaaagctagcaataccttacaaggccgactattctgatatagccatcaaagaattacatcagaagaaagacacgaagaagcggtacggaataaagaacaaagacattgcagagctcagaatcagcttaactgcggcgaatacgttgaaaaccagggtgatatacccatggtccgaaatcaaacaaagagagttggaagaacgaagtcgtggagagaagaatcggatcatagaaacgttgcgccgcgtatcaagaaatggcagagtaaaaacaccgttttcccatcacaaatttgaagctggagtgaaatagacacgaactcgctgaataacggacaagacatcatcggttgacaagggcattgacctagttcacgcggaacgagtcgaagatgactgcatggccagttagtacggcacaatcgcgaaagaaaggattgaagaagcctaccttcatgacctctgcggcaaccgctgccgatccacatcaaagtgttcaagaatgtgtatcgctcatcaccggtctccatggacagattgacccggtacttatagctgccggggttgacaccatctgccatgttggcatcaatgaccttttcgagaacatccttggcgcctgtcaaccatccttctgtgcgcacaattataaatgcgggtggctcatcgacagtctgaagaatgtaactcgcacgaaggttggtagtgcagtccttggtgacgatttgtgtatcttgaccaccgggctgttttcaaaagttaaacactggactggaaattattggaggttgagattcagccttaccagaacgatacccttaccccatcgaccggcccattggccgccaatgaacgagacccactctctctgtccccagacactgggcccaacagacaccttggggttcattttgatgctcatgcggaaatccagctcgagcgatggcgcggggatctgaagtgatcgggcgacgtcgccctcggggaatgtgtgcagcaggttgttagcggggatcgagtccttcatcacgctgagataggtagggcattcgagcagatgctggcgctggcgactagtattcttcgcgcgaacttgctggcagtaaatacattgaacagacagacactattccacactattagcttgtatgttccaacgcatatggccgagttccgtcgccgtaccttgtcttcttcctttgcgcggaactcaacgaaagctgcgtgcacatcgtccagcggaggcgcaggcaagctcgaacttgtcgtcttggtctttggcttgggagttgggcgtgagggaacggcgctgggcggcgcggagggaggaccggtagccgggaccggggtagccattgtcgcgcggttctggagagcccccagcggggtctgtaacggagtagcatgagggttgacaccgttggtcatgagggtgccgttgggagttgggatagtaccaggaccagctggacctgacggggtggctgttgggccattgggggttccggggtagccattgggagcaccgattccgttaggggcggcctgggcgggctgagaaggctgaggcgcgttagggtgaccgcgcagaccgggacattcaaggagatgttgtttctgtcgcgaagtgttctttgctcgaatttgttggcagtatatgcactgaacggagagacactaacacatgcacaaaccccaaaacgggttttcgtatgttagtgacggacaggtcgtgggtgaaatattacgaaatacacagtcacgcaccttgtcatcttccttggcgcgaaactcgacaaacgccgcgtgtacctcctggtcaacggtacgacccatgatgagaggagtaataggagcaagagtattcaggataaacaaaaaaaaagtcgtaaagaagaatgggtaagggcgcgtacgaggtgtaaagttggaggggtcagggagagagaagaaaagaaaatggaaagatgaagacgggagattacgcgggttacgcgccctgcgtaatttggagcactgcttacggtacgtgctgtccgtactggggtatattacctccagggctaggtacctttattattcttatactacctacgcatgtaggtatattgaaatttattagaacatagctatgtttagtttcacttattagtctctttgctttcacttcatctttataactagctggtctaactcgaacaccgggctaatagatgagatcgggccatagaaatatgaaatacatagttatacgagaaaccattatgactaggttgcctaataaaaaaaagcaatttcaaagtggacgccttaaatattccctatttggtagataatatgctatggatcatgatacatatccctcatagccatccatggatggatggtcctacaggtgtaagattatatctcggagaattcagggcaaacgaggcacactcggatcagagactgctatgattggatttggtgggggaaagacaattctcagaataaaccttgcaaaataagagcgaaaaggccgagatacatgtgtgatatgaaccaaataaatgcagatataaatgattattgacatcttatatacttcccaaagttatacttccgttcatttccagggttaatcgaaacagcttcgggtattatattactgtaactgaatctattatggacgttccgtatcccatacgcaatactgtcaactacttcagtttacaacatacacgttcctggtaagattggggtaaacgaagattgaaacattgaattaaagataaattcctgactgcaatgtagatcgtttcgatggtcccatacatcctcgtataccgtccacgggtagttatcaccttctctcactctttctctcagacttcgcactgtaaaaatgttcctccatctgcattccgggtgatgtaatgcgacagcacagatcgcgtcaataggttccttcacagcgatcgtcatggccgtggctctccattttggtgttctattggtaaccagtcgcacgcgactgaacagagcccctcacaccttccatttgcatttcagcgcttcgacaatccaccatcatgtgttcctcgacgtcattaagacctagtacgcacggttcacgatcagatccccgataatcgcaggaaaatctcgccatagcgatagcggacttcccactcggtgctttcgtcgatatactcgtcttggtgtacatgcaacacaccctttgtcgcgagcgtgagaacattcatcaaagcctgggtcgcaacagctggcgtcgtactcccaggaggaagcagactcgcgaacgtggtctgaccaagtctggccgcgaccgggctggacgcgttgctgttcggggtctgtgcatttcctgctttgccattgttagcaggacctatcttagtcttcatgaattctatgaaattcaagctttcccgatcaagagttgacttgacacgttcaagagcagagcgcttgcttggcgagagtgagctgatattctcgcggtccgtcgcaagctcgccttcgagataacgagtaagatctaggtcgtctccgaaatcgcctaggagctcgaggctatgttggtcttgtcccccgagatagctgcgccccgcaagcggactggcgctagtgagacggctccggggcttacgtccctgagaagacagctcgctgacactgccgagtcgacgtctttgtcgagagctttggatagaagcggtgacattccatggcatctgggacgagtggtcgtcaaacagactcgagggggcatcacgaccgacttcaacttccatgttgagacgctcaatgttctcacggctcagatgctctgcttgttcgtctctcgcgcgtactcgacgtccctccgatagttcatcgtcatctgcgctgcgctttcgcccttttcgctgagggtatccaccaacggcttcaaacagatcctcgcctgagtagaggctgagcggatgctgttcatggtctattcccagtccgactccaaccgagccgattccctgaccgaaaacccagaaagcagcattcttcttcgaaatggttggaatcttgttttgctgcttttgcttcagtgcttcgttcatgttcgcaacgtattcattgttccattgggccagtgtcatatttcgaagccccgtggtgtcgtcagtgatgatctcctttgggcgtctgacatggcgggtcctcactgcttgaatctcatctgtttcttcgactagaccaaggccctcatttgtctggagaatcgcggcatctgcggtccgggtgtcgagatccatcatgtcgttggtatcagccactctgacttcctcgtcttcaatctgcatctgttgagcagagtcagtggacatctttttggttgcggcatggatgcttggtactcaccgaatctccgccgagctggcgttgttggtcgtctgtcggtccttcactttctctcggaccaagggtggatttccttgcatgaggagacttccctctggtatcgagctcgatgatattgccatcctcgtcaaattcaaagtcaggttgaaggagaacaccctcttcattgcctaatcctaaacccgtcacgttgccgaaagggtctttcttctgcgcagactcattgatctcatcaattcctaggatagtaccctcacccaggatatcatccgatgggagctcaaggtgcaggcttgaaagctgtgaggctccagacaagctattgttgggcgacttgatccagaggccactaagttgacttgagctatcgttcgtggtggtagtgaaggaggagaagtcaatttcaagtcccggaagagctgtctcgggcaggaaagacgggtcgtaaggtaagataagattgctgggcctgggataaggttagtacccgacaaatgtcttgtagacttacaccaccaatcaacgggacatacttggtctggccagcggcgggatcaaggccactgcccgggatgatcttcagcttggataccatcttgtcatgcatcgcctgtgtgtcgagcagcgtgtacccgcactgttgattgtacactcgagaaacaccatacctaatacaggcaagttgttagcatacccatggtgacatcactgagcaacagatcttacagcagactcccctgcagccgaagggccatgggtgcatcgggattgataataactcgacatgcattggggacatccacatccaggatggcttttcggtttagtcttctggaaatggacctggatcccagagttgcgactagcctgtggaggtggtactattagtcgttgatgtggaactgcgggagccctggatgttcttaccatattgtcgcgacaccgtgctctggcgaggtgaggactagagcatggcaagcagatgagcgtttggtccgagataacgatcgcatatggggaatcagtcgacttactttcatggctgtagaacatggttgcaatgcaaatggactcgagtgatgcccaggccctcgagtgtccagacggcttggagatgcagcaagaatattaggatggagtgggttttcaggaaaacagagtaggtagttattgggttgccttgaaggaagatgctcgcctcgggtagagagtcagagagtcagagggactcggagtcccagtgggatgggattgctgcacaatcagagaaaaagcgtgaccccagaagcagaacttcacagtccaggaacgaagaactcatcttcatactagtcttgatctccaatatgttattctacgcattgtgtgaagatcaagtatttccttccctcttccttatccacttcgatctttccttccactcggaatttctaatttcttcgttcttatgcatcatagcctatcttatatgtcagactctaggctgtcagtttgcatcattggttgacccccagcgagatatgccttctcgacccatccgtataatatcttcgagactatgaatgtgtcgacgtcgattgagggaggaaggcaagacaaatgcaaggtgcatagactgatgagcaattaaatgtgcagattaatcagagcacttttattaagacaaggtgtaccctgctgtcattcgattggttcaagttccgttcctgtagccaggttttcagactaaagcccccatgtcgcaactcttcaggatctccctccactggaaagcaaacccccgggcttcctcttttccggtgtcaggaaaatcaaatccacaccagatcatagtgagcgggatgataggcacgaagccgatcccaatgctcccgcagacgaatttcgtaggctaagccgtcaagtggttgaaatggttctcctctaacaagagctgggtactttctatagtcaataaaatacacatatactaattctatgaaatgtcctgccggcgaaatacgatatgcactggcggttgaagactgccgtacctcgaggcgtgaatggatgtgttatgtgtcgaacacacagtccacgctgacgatctcgtgtcaaagcttcccattaacgtacattgttttctacttacaatcgattggaattccatgttcccagtcgttcaatgaaccaagttgattcgcatatggtcatggggcagggaaaaatgcgccggggattagctcaaacgccaacattagaagaagaatttacttttcttgggactctttgagaaaccatatgtcagttcagcacaaggaaacgaaaaacgatgagccatctgaaaggatggcagcagaattctaaggggcaaaaatggaccgagaccaacagaaaccgcactcttttgacacaaatgtataagcgtagacataatcaactatggaagatccgaaaatagatagagagcacccagaaatctccaacccagagcgatgtataggatgcacggggggtatgagacaaaagacatgcaagaacaacacacaaacacactctggtaactcctcgtcactgaatttgagtgggagcttagtcgagagggatgccctcgtactcggagtagcccagagccaagttcatgttttctattggaattcgttagcgtcatggctgatgaagtagatgaattcaacacttacgcaagcactgggtggcggcacccttcagcaggttgtcaatagtggcgcagacaaccacgcgctcgccgctagagtggacggcaaatccaccgatctcgacaccgtggcggccggcaatgtccttgacaagaggggcttcgcccacgatcttgacgagcttctcgccagcgtagcgatcctggtagaggttgcggatatcacgggaggtcatcttctgcttcagaggaatgctgatggtgtgcttgatataaatgttagcaattgtgaggatcaatgagcggccaaagggcacttacggagataccctggaaccaaacggcgacgtgaggaacgaacgcaatgttggtgcccagctgcgagctaatctcacgctcgtggatgtggtcagtcagactgtaggggatgaggttgttggtaaggaactgcacgtcgttcttggggctgggcttggtacccgcgccagagtatccagaaacaccgaaggtggtgggctggccgccaaggaacggaacaagaggagcaattccaagctgagcagcagtcgcgtagcatccggggttggcaatgcgagtagcccgggcgatcttagaccgctcaaccagctcgggaagaccgtacgtccacttagggtcgaagcggtaatcagcgctcaggtcgacaatgacgttacccgtctgggaaccttcgtcaacggcatcgacaaaaggcttgcaaataccattgggcagagccatcacccagcagtcgatgtcaccattggcagacatcttgcggacatcttcggggctgagattctcgtaggtaatctcgcgcttctcgtagccttggagcttcttaccagccagctcgcgggacgagacgtgacgaagatccatgttaggatgagcattgagcaggttgatcagggcctggccggtgtagccacgggcaccaatgagagcaaccttagcgggctgggtgttggagatgttcttctctccaagaggagggttggggttggtagtggcataggtgcggaaggtgctcacggcaacggtgggacgcttggcacggttcatgcgcagggcattggtggtggttgagaacgcacgcttctgctcaacagaagcaccgctagcgccgaagcccttgccaatgttggcggcagcctcagcagcgcggtgaaggcgcgcctcaaggttaatgtcaccgaacatctggcgaccgtgcgtgttgaactcctggaccagctgcttcacttcctcgccattctcggcaccgtaccagaagaggacctggccatcacggctcaagctgccatcggccttgtcaaagaaccaggtcaggttctcatcatcctccttgacagtccatgccagcttggggaagtccttcttgatgctggcgaagacgttgtcagcaacgttagtcaaccaaccagacttggtgatggtgaaggtggccaagtgagccatctgcgagttgggctgcgggggcagcacaacggccagagcttccataggatcgtcgtagtagatcttgaagtccttctccttcatgccctcgacatagcggtcaacaacggcacgggcatcaagaccctcgcgatcacggaccaacacctccttcagtgccttcatgtcttcaacctcggacagagaggtcttgacgtggatcttgttaccgcggcggatcagggtaccagcgccagagtcggtgaaaagttccttctgaagatcggcagggtgaatgatagcgacgctagaggagcgaggcagatcgctaaggagctccttcatttccttgatcttcaggcgagtgccatggcgcacccaccactgactcatcaggtggtcgtactcctcgtcaaggttgatggcggagatcttctcaccggtgtcaccgttgaacaaaccacccttctcggccaggtagacaatcttgaggggctgcaaggcgcgcgcaagctcaccggcagccacatcagcattgacattgaggacctggccgtcgggggtctcggccatggaggtcaggatgggcaggcatccagcggcaatagccgactcaatgggggccttgtcaacaccatcgatcttaccgaccaggttgtacttgggcttatcgaggtaatcggccgaaaagacgccggcggtaatgggacgggcacggataccgatgcgctcgagctcctcaaccagcttcatgttctcctccaggaagagcttgcgggcgagggccagggtcttaccgtcagtcactcggattccatcctcgaactgaggctcaacaccagccgcctccaacatgcggttcaactgggggccggcaccgtggacgacgatcgggtacagaccgacatggttaaggaaggcgagcgcggatgacagggtctggagatgctcagtaataatagcaccaccaaccttgatcacggcgaattgctgagaggacacggaggtgaagtgtgacaggtactgctggacctcgcgcttagagccaatattgctcagcaattgcacgacggtgctgcgggtgttggtcaggtgaggatccgccgagcgggagtagttgcgagtctggcgcagggaggcagtctttgctgagactcgcagagcggtcggtgcggagagagaacagaggggcttgcacgaagctctccgcacagcggagcgaagggacatcatcttggcaacgcacatgcggcagcctcaatggtctcacggtcggccctgggtgggagaggccccaaaatatgtataagtaggtgggaaggtaggaaggtgagaaaacgctgagtcaaaaagagatatttttcagatcatcggccgggcctcggagcgataacttggcccaatgacggggagaaggcggtgggcccgtctagcgagtgatttatctccatcttttcccttttaacgtgcggcatttgatttttattttcatgaatttattctgaattttttggtttttggttttatatatcgcatactaaattttatactagtagagtgattttccttgactgctagtctacctgtatatgtgcagattaacatttgtgtgcccgtaatcccgggaccagaaagtataagaaaaaaaagaatcttcactttcggatacatcaaccttggaatctctttctcaatctctttagacttcctcaagcgagagtctttcctccgaaaatgcccacttattctgctcggagatcttgagacgtcatcctgcttgggtttagtctcagttatctgatcctgtcccttcttcttactcgttgcgtttgggttcggcctatccactaccctccacccggactggatctactctgggcgtcctgccgatggtggtctaattgaggaattggtggacacttgttctcgtgccaagagttcccagaattatctgatttttcttaccccctgctcaacagccttcggtagatgaatacccgaaaggttcatcatgaggggcaagacttgcgctgctgcactcctatagcgagaggtttatgggaatatttagatcaattagattgataacaagcagacacttgatgtcaaagggtgtgggcatacaacatataaccaacgggctccttattggatcttattggcgaattgaacctcgcaggtcagatgggtcttgggccacgtggactcgcaagtgtgctagccctgctactaaacggcctcatctacagaataaaaatataaatggtaggcaaaattggagacactccgacctactgtcagactcaatggcctctccatgaccacttgcgaaccctcatgacaaccgagagactcaatcgacatgcacacaagggtggatgttgacttggtcatccaagtgtggatctaaactaaccgttctacattgtacaaacataattgttctcaggtattccagtaagactgggtagttgaaaaagagcataagagcacgataagggaatttcattgcagtgagaagcacccgaatggcaatgtggtaagcatacttaaacacggcgtcatggaagtatcatttacatcttcacccgtcgaccgggtcgcatgtagcgacacaatccaaaatcggatgatctcgtttcgttgcatgtaaaagtcaaggatttggtcattgaaaacacgcccataaaaaaacagcaggaggtattagcggctgcgaagaaaacggaaaaggccacacggccccaacaacagtaagcccagtaaaattcaagatcccatgtccaaagagaagtcgtaagtcgcgcgcagttcaggtgcttagtgcttggtggcaatcactatgtaaagcgttagtcacgaagtcgagctgggaagtcaggagaatgccagggagcacttaccggacggcacaataatgacaacgagaaggagaatcacgcagatgacgagacacacgcgcatcttcatgtccttccaccacatatctttgcgcacgcgattggcacctcggcggaagccttgggccgagacggcaaggttgtcggtcttgtcctggagagaatccaagttttcaccacgctgggagaccttgttgatgttttcgcgcatcacaccgacggtatcatcgatttgctatagaggatacccatgtcagccccattgcaggaatcaattgccccagccttcgcatttcgatatatcaacaagacaacaagcatgtgccatccaccgggtaacattcatgtgtcttctcaatatctagggttgctaggagtcaagatatccttgaggattgacttactgcttgcaaagcggcggttcgctggttaccattctgcccggtggcaccaggggctccgctggagccggaggggatataagggtcgtagggttgttcggtggcagccattatgtgagtcgtgaaaggatttgagagaatctcagatctggattggccggagactgggagtgtctaaacgacctcgtgggagcaggggttgtgttgttttgatggggaagcgctgcgaagggacagtctgggtgactagaatcgacgcagatcgtgggtatgggaggcaatttatcgtagagcgataaggattaggatgtagcgcaacggcgagggacggagggaaaggattaatggtgttgtctgaagtgaagctgacaagttgccgctgaggcggctttgcccagagtcacgtgctgtggcgtttcgcagtacaaagcatgctatgtaggctcccggcttttgtgttttggggtcttaaatgttaattattttcaagtctatgattattcgcaattattgttggcgaaagacatactcatcattagtttggcctagatagttccgcggtgtccttcaattaacattggaatttctttaccgcaaacaggcacaatgtgagagttacactacaaggatgaacaagagtagatgagagtaagttatattctattcttcgcataactacctatccacagttacatatctgtagatttttgtaatttttcgctgcataaatagtaaagctctttgttatatggctgcctattgatatgccgatagaagcgtgttgctcgaggaacgagggacaacgggtccacctattattagtaacgcggattagccctgggggtcacattttccagacacctttccgaggttgatttgacatttcatgatcagttcagtaagtcgatgataaatgcgtgaaacctcagaccgtaactgaagacaaacgttttggtcgaggtccgatattgaaaatcacgaagtcaggcaaatgggatatttattcatgtactttgacgggatttccaagcgactcacctggtatacaccgctttgtgggggtatattccatcgaattcaatcggaattaccccgtcggtatttgcgtttctccttgttttagaagacaacttggtttaattgttcgaataccttccgtcgatccatttgaagatctcatctttatatagatcgatcagcgatataggaatcactacaagctcagtggaacccaggatgtcaaagtggttcagtactcctttcctagttggatagacaaaagtgtggcaagatgagtcttcccttgccagggcccaacaaatacagagtaagctgggaatgttggtgttgttgctatctagggctgcaagtttagaatttgcttccacctagactgccttttatgatatcataccataatatctccaaattcccatccatctcagctagcccctaatagccttggcaacagtctcctcaataaccctaatcatgccctccgtgttcttcatatcaaacggaaccatatgcttagaaccatgatcatagaaagccgccttggcgggctcacaaagctcaaataaccttactccctcggcgaacagcggatccgccttgccaacaatattcgccgttgggatggcaatcgggtacgtgtccggctgcggtgatatatgctccagcccagaactctcccatggcgccgcaccgcagataaacaccgcagcacgaaatagcggtggttcggccggttgcgtcttcttttggtggattaaaagtgaggctgctagtgctgcgccttgtgagaagcctataactgcatcgaatgggccttcttctgcgatgaagcgcttggtatggtcgaaggcttcgaggacgctggagcctggtgaggtacatcgggtgtagtggttatagaaggggccgtccactattccttcgagttctggattggagttgggttaatacatgggctaggcggttaatagctttcggtagtaagcttaccctcttcgactttggcgtttatcttgccgttcatgaatttgaagcggtgcccacttttctctagtatttggcggaggcctccaatttggatttcaaaaatctgtagccggtcagtgttttctatatgagcgctactgcatagtgcttacttcgccattggtgccaccgccgtgcaagcaaagaaacctcattttggtttaaatattccgtgtctcaatggcgggaactgaaacgtagattgtttgataagagactatgccgaaacagttcggaattttgtgttacggccgaaatccttggacttcttgtattcgaggaaaagagaagaaaaagtaagtctgcaggacaggtggccaagagaggggagtttcaagatacaagggggggtttaacctgcggggggcttgcaggactggactactagcttggcgatgaaatgtccacgggtgagatatacaattacaaaatacccgtggacaatcggtttattgtttatgtttctttatattacaaagttgaaggagtctccagggcttataggttgggatattccagaaatgaatccctgccgtatgggaccaataggaaaacttgataagatcagagagatcttggaaactttccatctcaactccgtacacttcactacatgccaaaaagaaacgatgtcatttcttggccccaggccattcttaagtttggatggctacttaatccccccctcccggagctaacctgatttcaacttctaccctcatatccttcattcaatctgatcgcaccgagtatggatctccgtgattttatagccactcgtggcttcgcgacctatagcttgcgtcatccccgggaagcactatcgagctttggcccgactctgaatgaggccaccttcggctatttagggccctcgttcaagccagagcacgacattcgcgacctggatggcaaggtcatccttgtaacaggaggtacatatccttcttctatacctatctacatatctacagcttccagaacactgacgccgtgattgattgacctaggtaatgccggtataggccaagagaccatcctccaactcgccaagcatcgcccgtcgcgtatctacatggccgcccgtaccgagagcaaagcgcgcgaatcaattgaatcgctacagagccagctctcctctcccgccgatatccgcttcctcgcgctcgatctatcttcctttaaatctatccgcgccgccgcagacaagttcaagtccgatagcgatcgcctagatatcctgatcctaaatgcgggtacgatgggcaaccctcctaccacgacggaggaaggcttcgaagtccagctcggcacaaaccatattggtcacttcctactcacaaaactacttctgcctaccctacagaagacggttgatcttcagcgcgctaaggatgaggtccccgatgttcgggtcgtgactctcgcttcggcggctcacgctgttgccccctctacctttgaggagattacatctacccctggcttgttggcttctagtacctggacgcgctacggcgcttccaagtcagctaacatcctctttgcatccgagctggcccgccggcatcctgatatactgtctattgccgttcatcccggtgcggttgatagcgggctctatggccacacgaagagtctcaattcaatgatgaaatatggtcttgctgctgctggctccacgttcttccgcagtgttgctactggagccctgaattctctttgggcggctggcacgcaacgcgagaatattatcaatggagcttactatagtcccattggctaccgcagtggtggcactgcgaccgtgcaggacgcgcagttggctcacaggctctgggattggaccgaggctcaggtttcgaagcgaaaatgaaccacaggggcacctgtgatgaatatataaaatgactaaaatgttatcggtgatttagcttgtttctgcttttttaaaatccgcgctgccattctcccgcctatggaggcaaatggcatcatgatgatttcgttgtcggtcatgctgccctagtccctaaataagtgctctcttagctcgttcatttcaaagaccccagaatcaaacaaggtatcccttgagtggagattccaaccctcaagcccgtgtttgccagacgctatcaccaggatgggccacattgtcgtgaccggcggctccggcaaagcaggccaattcgtcatcagcgagcttctcagcgccggacacataatcctgaatctggacctaatgccattagatcacccaaaggtgcacaccctaaaaaccgacctcgccgacagcggccaggtgttcaacgccctgtccggccaatggacactccacgaacccttcccggaaggcctcccgccacgcccagacgccgtaatccatctcgcaggctacgcacgcaacatgcttgtaccagacaacgagaccttccgctcgaacacgcagggtacatacaacatcatcgaagcagcgtgcaagcttgggatccggaagatcatcatcgcgagcagcgtaacagtgtacggggtagctttcgcgcagggcgatacaaacttcccttcgttcccgatccacgaagacctagacgttaacccgacggatacgtacgcgatcgcgaagctgtgcggggagcgcatcgcgcggggttttgcggcgcgcttcggggtggatatatacatcctgcgtattgggcgggttatcgagcccgaggagtacaacaaagagatcttctacagctatgtgcatgagccggcgatgtggaaggtgcatgggtggtcgtatattgattctcgcgatctgggcgggatgtgtgaggcggcattgcgggctgatgggcttgggtttcaggtcttcaatgctaccaatgatcatattaccaatcttagtcctacgaaggactttttgaagtcgcagttcccggatatacctatcacgcgcgagatggaggagtttgaggcgccgttttccaatgcgaagataaagaagcttcttgggttccaggagaagcatccttggcgcaaatattttagtaattgggagaagaagcagattgagatagaggagaaggagagagctaaggttagtggttagtagttagtagttagtcgttttggatggaatgaaactgtgtccactgctggggcttttggggatataccaaggtcagtatttcagcaataaggatattgaaaccatataacaacagtgtcaatataaatctaatgttcgaatgttggcaatagactacctaggtatgtctcttgatgtatctcatctactcgagatcagcccgattagggtttagccgagcgtcaatatcccacaatcgaacaagcctgggactttgcaaagagccaaaatcaccagaaagaacagatagaggatattccaatagaatcaatttataaaacacatcagaatgtagacattaaacaaaaagactgcccgttaacccaaatcggcgcattagcgaatattctggtccaactccccacacaaaactcattggggatgcatcatcattccacccacttccacttcacgttccctcctaccatctccccctcaaccctttattaacggtacgtagagattcattgttggaataattgaacagaatctcttgtccctaaattccaccgaattaccagctaatcccgcaccaggcgatcacccctcccgacttcatcatggatcaggcaaagttggctagaatgcaggcgagcgttcgcatcggtatgttcctgtctcttttggaaatattcaagaattttggagcttgagatatgatctgggtcatgacgtggagctgtgattcttatggaattggtagtcctggagcttggtcatttctcaatgctgcaatttacttgcatgtctggtggatgcttgtacaaatttgatagctaacatgatttctcttgatagggtatgtatattctgtccagaacactcgtttaatcccgacctctcgattctcttatgcggaaatgaattttcgaactgcaatacccggattcgacacagccgatagtcagactacggattcttgattctcgatccttgaatttatgcgacggcgctatatcccaaatatcgaaccgaagatatcgcatggctcagagaatccagtgtccagtctgactcggcctcgtcatgaatcctcgcattccttcgatcttttcgcccccctcccaattcatccccccaccacgcacattcacccactcgtccgcaccgacacaaccacatttttcaaccaatgtccaaccaactaacaattttacagtggcaagggtactccccgccgcaaggtcaagaaggtcgtccgcaactccggcgccgatgacaagaagctccaggccgctctcaagaagctgaacgtccagcctatccagggcatcgaggaggtcaacatgttcaaggaggacggcaacgtcatccacttcgccaacccccgtggtgagtagccaccacccggaaaccaactttggccttcaacacacaaggcaaggaagaaggaaaggaagaaaaaaagactaatcactcatcgcgatagttcacggtgccgtcccctccaacacttttgccctgtacggcaacggtgaggagaaggagctcaccgagctcgtccccaacatcctgaaccagctcggccccgactccctcgcttccctgcgcaagctcgccgagagctaccagaacatgcagaagcagcaaggcgataagaaggacgacgaggaggatgatatccccgacctcgtcgagggcgagaacttcgagactaaggaataaatacgcctagatgcgaactaaatcgagtctttaaaaactttcgtctatgatcaatgaaatttaagctctggtttgagagttgtttttgttgagtctttttctctttttctcgttttgctgtttcgtctcttcctcacgggcggagttgagagatgcgtttatatcgtgtcggggctattgatgcacctggtgacggaaaggaattctacttctgacagttcgattatttatccgaagactcgttgaagtatgaagaattgtatgttactgtctacggtatgtcaattttgggcgcgattcgtcgacaggacagttcattatgtctgctatcagcagctatcgtacaaatgatctattgaccaacgcccgagccattctaccacaaagcctttggcctcaatgccatgcgcgacgcgcgaagtactgttgaggactgaccctcaagctgcgtagcgattcggatttcaggttgatcgcgcccaagccttcgcaattgtgacgaaagatccgtgatgtagtgaatgaaagacaaaaagatattccattcccatagtacgcgatggccttcatgtcgcctcaactatcctccttcagtccgcacatatccgtcctcaggaaataatcgaacgtatgccagaacctccaataaaggccagacctttccgaatcgaatgtgccgtcctcgcggagttgcgggccctcgcccacgatgtcacctgtgaaccagctcaagatggggattgagcggaggatgcgctcggtcatggttggctgtggagggagtgcctcgaccatggggcgcagcttggtacgacggacggtggggatatgcgtcatgaattcgtcgtcgggggcgggttcggcttgaccgggagctcggcgttgatggactgaggtgcgatcgttactggacgaagcccctgtcgtccatgtcgacgaagaagtcgtcgtattgaaactgccttgttggaatgagggtgtggcagtggcagtggcagaggttgcagtagatgtaattgtatcatcggaggtaccagcgaccgtcgaagaatcgaccgagtgccgttcgtcctctgggatatccggtacactggagaggttgttcatggcaaaggaccgaggcagtgtcatgcggtcctggtctttgctggagttggagaggaaggcggtcgagtgtgaggtagtcaaggtgcgcggtgctttactgcgaacccgactgctcgcagcagagtctgcagggatgggggcgtcttcggctgggccgtggccactgtagagctcgcagaagaccatgtgcccatcaatttcctgtggcgagtagaagcacgcgcggtctgcggactgggtcgagtcgtaggtaaccttgatccagtggtagccaccagcatagcgcttcgacttgcgattcgcatcggccgacaggtttcggatgacaacgtcgcctccgctcaatagctgggtgtattggttcgctagatttgggtcgttgcgagggtagtcttcgcagatcatgccctgggaaatgcgctcgtacttgtcgatcaccttccactcgctgtccttgtttttgtatccatagagtatgcattcggtggcgaccttctctgtttgcttccgtgggttgtcgagactggatgacgatgatgatttgggcaagccgtgtgttttctcctcctcctgctgttgttgcgagaataggcgaccaaactcggcgacattggggttctcgcgctttgctggtgttccagttcgtgttcgtgagcgggcattatcgtatcgagcatttcttctcttgccgaagggtcctgattcttcaggtggtcgtcgagggttgcgagattcactgggaacgagctggtcagctttgataggaaaggagctacaaatctcactggacatactctttgtagacataaccccaagggagcaggttgccatcttcgtctctggcgcgttcctccagtgggacggagtggtactccatgacggtagatgggatgtagtcaagggataaggtgaacgcagagggaagagacgtgaaaaagtgagagctcgagaaagggaggttctgcgagatgaatgcgcaaaagggtaaatttgtccggcatcgagggatccaaaacttttggtaaacactggttcgccgggatacggtcacgtggggccgtatctacaaaaacttccacgatttcttcttttcttctgatctcttcttttcttaatcatctaatgatttatctttgagaaattgagttgtcttggtcaattggatgagcctttttttttacaatacagtttaagccccagccttaacatctccatctaatatggaaacatatcacatatgatgctaaattgggaaatacaaaaatcaattccagatgccagtcgcattacctaggtcaattttgatgcaaaaatgatatatatccagcatccccttccaattcgcaccgttctgcaaaatcccctacttcgtgtcttcgttggtgaacatattccacgaattgatcgagaggacaagactccccaggacctgacttgcagaaaggcagtggtatgattcgatcattgatgttaactcggacgtacggatcctcgtgttctggtgggcaagataatcgttcaatcgtgatccttgcgcccatagggagaacgggagaaatgcgccattcccggtttgcggcaatgtgggtgggaagaagtttcttgtcgccagtgaagatccctagtgctgtgaggaatggggctatatcgccatcatgtacactgggtatcaaattagcacaaatgtgcttcgcacgggacggatgatgggctaggcttacaaactcaagaacatgcttcccacgattggtccatcgtgaagcagtccagtcgttgcattcaaccagagccatcccatcgcaccagcgtatatgttgcccggacctgcacggtaataaagcaacaagtcgcgagcatactcgaagttataccagtcctgctcagtaaacacttcacaccattgactcgttcctcgcaccatagtctcgaacccacacatctcctgcatgccataaacatcttcatttgagaggttgttcagaccgacattgtcctcatcgatcaggcggcttgcaattgcaggaatgtatgtttcctggaattgtgcaagcatcttcatgccattgtcatggccaagtatagtgtcctcgagatacttgaggcaggtatcacctggagtcaaagtgtctccgcccctttcaaaagattcaggaacaatctgcaactgtgcttttccagagctctcccagtctagaccaaagaatccagaggcgaaatgacgggctgtatcaatcacacggcccgagtcacttgcccatagatgcgtgcggatatctttggggatcaaatgtacatatcttgtcctgaatatgacaccagtcctgaatgcacccagcgttccagcgtaagggcctgtgctggtcaactcaccaaagtctctttcgggtttgtcggagaaataggtccagttattcaagaattcaagtgagccattcaagggtagtcctatctcgttcactcgcttcagaaactggagatgtcctgccattgggaaacattaaaacatgttactcctaaccgatgggctgacctactactcccggcagagggtgttggatatcgttctccgtggcgagataactggatcgtattagcaaaatcatagtaaggaattgtcattagacatactaaatgcacttggtctactgagcagccatctgggggtgctagattcgaagctggcccttcaccggcgttttcaatccagggcccatttcctcccaggtggtggagcacattccaccccttcgccagggactgctttgagtctggcgacttagatagagatggatggaaccatgttttccagctcccaaagtaggacgactcagattgctcttcggatgatgatgcaatagactggaggaacgaggatttagacgcttggtaaataacgagacccagggcaacagtgaagaggaatattgggatcttcaataaacgagtgaaagccatgtttgccatgaaccatactcaatccaaaaagacccaggcgttgaatgagttggtccacgtccaaggattgtggaggtgcttatgtcaatccctttgtgcgggctgggcattctacaagggattgagaccgaggctttatagatgtttagatgtctatatttgtatatttgcatttaattaacacgaataaattatgaaagacatcaaagcataatgctaaatcaaactaaatcaaataattgaagtctgcaagaattctcatctatattccatccgtatatatatatccccgtcacattgccgcctcggcagcgacactgaacgcatgcacacttcctcgaggctggaaagccgacggattctgatgagccttgctgtcgctcgtcgctaattcattgtcggatgccttaccccagccaccacctccaggtctaagccaaaagaattgtcagcatacatcttcagataaacagggaaggatgtgctcacgtatgaatcagaatccgctccccaggctggaccacgagctccattttgcctccaatattgatcattctctccgttccatcgggctccttcttcaggtaaatattcaagcctgcttgtccaggctcaccccccgccaacccatacgggcgatacacgcgccgttcactgagcatagacaccgaaagaggcatacggaactccaactcacggataacaccatctccaccgcggaatcgaccaacgccaccagagccatctcggatacaaaacctgcggagtattacagggtaccgcagctcgtagacctctgcatctgtgatgcgtgtatttgtcatgtggacatgcacgcccgaggtgccaccccaagatggaccagcacctgagccgccgcagattgtctcgccaacgccaaatccaggaacttcaatgccggtattaggatcaacgccacccataccaaatgagatgatgttgcagcagccctgggaggcagcacaggcgttgaaagcacccaggacgacgtctgtaatacgctgtgatgtgatgggattgccggcgcagacggcggcatgcccagatggattgagaagtgtgccagagggaattatcacattaaccggggctagacagccctggttgaggggaatgtcaacatcaatcagagcccgcagactgtaaataatggctgaatgggcgatggctttcggggcattgagacagttgaatgtttcccggcccgtgcctgtaaagtcgaagtcggcagacccagtgtcagaatcgatgcgaatttccagcttgatctcggtgccgtcgtccatgaagtcagagaatcgaaggggaactcctttgttcttgcggccaatggacttgagcagttcacggacggcgacctctgcgttgcgcttgattgcgtccatgtagaagtggactacttccaatgtgttctcgatcaccaaagcttccaggagctgtgcacccttgtgatttgctgcaatggccgccttcaaatctgagacgttgtcgttgtatgtgcgggtaccactgcagccggggtaccatgcgggctcatcatataggaactttcggactatctcctcgtcaaaacggccttctgatactaccttaaagcccattgtcatggcaccttcttcgtacagcatcttgctgtttgaaggcatagatcccggggcgatcccaccgatttcagctgattttggttaaaacggcacggcgaatagtaaaggagaaagagaacagcttcctgcttaccatggtggccacgggaggcaacatagaagacaatgtttttgccctcaccatcccagactggagtgacaatagtaatgtcgggaagatgcgttccaccggcaagaggatggttggtgagaatgtgatcgccgggcttcagattgcctccgaatttctcatgctgatgccgaacagcatactccatacctgaagaagatgttagcataccattccctttggctaacactcaacacttttgaaacgaggccttacttcctagatgcactggcacatttggcgcatttgcaaccaattttccatcaggagagaacacggcacaggagaagtctagtcgctctttgatgtttgttgacacggaggtcttttggaacattcgactcatctggtcagcaacagacatgaagcgatgaccaaagatggacaatctgatagggtccacgactgttgcatcggcagcctgcttcttcgaagactgaacatccaaaatcacatgccgagacagaatcgtagctgtagcatttggctcaacaacaatagtttgagttttgtcaatgatcattgcaggaccctccaggacatatcctggttgcatgttatctaggaagaagaccggcgtagcaacttcaccgacgccggcaaagtacacagacgatgaatcgtcctgcttctctgggcccacaggcttctttgtgactgatttgagctcctgttgaggtgcttctggcgcaatagaggttgccttcccaatgccacggactcggatgtcttcaacaagaatgttacggccggggaatgtgaaggaaaattcgcggttgtgctctttgacaaattcagcaatgaagtctccgtgatcaggttcgagcaccatcaacaagttgtcggtaccctggtaccgcagattgaggtagacctcatgctgaatctgggtctccttaatgtcgtccgtggtcaatgcgatagtgacctttgacttcagcgcagatatacgctcggtgatgcttctcatggctgtctggtccagcactcctgatgctggctcttgggcctcatggacaacgtccgcgagagccatgccataggcagataggatagacgagaatcgatgaatgatgacagttccaatagacaacgaagaggcaatggcgcaagcatgctgtcctccggcaccaccaaagcaggccagattatgcgcggaagtatcatgcccacgagcctctgtgagggctcgaataggcttcgccatagactcgttggctacttgaatgaaacccagcgcaatctcttctggggacttgctttgtccggtctcagcattgatcttgccagcgagctccgtgaacttcttctgggtgatttcgaaatccagagcttcattctcgttcgggccaaagatcttagggaagtatgccggaagaaggcggctaaggaaaaggttggcatcagtcacagtcaaagggcctcccttgcggtaacacgctggtcctggatgagcacttgcagactcgggaccaacagcaaacaatccatgtcgccagaagaggatgctgccaccacccgcagctactgtgttgatgtctagttggggtgccattactgtcacaccggagatagtgttctcgaatgtgtgttccaactttccgtcatacctggagacgtctgtgctagtgccgcccatatcgaatctgcaaaattagttgatcactttatagcgtaaggtgatttggactcacccaatgactggcttcctatctgtctcatcgaaagaagttcccgcatagcccacaacgccgcctgccggcccagacaagatcgcacggagaccattgaatctacagcattagcaaaatttattctttgaattcctggtaattatcaacatacttttcaaagctagccaagcctccatcactctgcatgaactcgcagcgtgtgtcggcagagctgagtccatccttgaatcccgagcggaagccttcgatataacgctgaatgactggtgttaagtatgcatctgcggtcgccgaagcaccacgagacgtcatcttaatcatgggtaacaattggctggatagggatatctgggtgaaaccgatttcctttgcaatcttctcaattgcaagttcatggtcttggaatgtgtatgaatgaaccaaggaaaccgcaatagagcgataacccttctcgtacagctgctgaaggctttgtcttgtgcttgtctcgtcaagaggttctaagacgcgaataacctctccactgacacccatcttcaaacacgcatctgactgcaaagccttttgcagactatctttatctggagtgggattctgttgataatcctcaattgtgacacgctcatcaacctcgacaacgtcctcatacaagacatcagggcgttggatgttgagcgcaaacagctttggtcgagactgggttccaatgcgtaaggcatctttgaagccttttgtgatcaagagcgcatgacgttctcccttacgctctagcaacgcgttggtagcgactgttgtgcccatgcggatgctgacattggagaagtcggcagttgtgagcttttgatcgcgcgggaaggtcttgcctgttgctttctctagaatacgccggatgccctcaatcggagcgtcggcgtagttggctggatcttgcgaaagcagtttgacgacgatttcctcatcgtgaccatccacaatacctagacagtcggtgaaagtaccgccacgatctggaaggcgtattagctacttgtattatgtatagaaattctgagattggcaactcaccgatggcgaccttaatgcttggagcatccaatcgagtagacataatgtgcaatatgttctgccctgagaaagcaaggaccaaggcttccttttatggatctccactgggactaatcagcaggtcgaggcgaagtactttatacaaaaggcgccacaattaatccaatcggctggtggatgccgagacagagcggggagacaaacgcggagaagcaccgcttatcagtcgctccgaccttcctgtcgcacgcaaaccctaattcacctgactttttgaagataaccacctgggtggttttcttccacgttcatttatgctcgactgaagtataaagccaccccaaatgactatcttggttttcgatgtgtacatgccccttcctaccacctgatatatacgcttctttacttcattaccatggcagacgaaaaacaagctgccactccggagatacaacccgcacttgatcaagaaaagacccgagcaggagagatccttgaagcccaaaaccaagccggcggcaaagatgttgcagcacaattcctcgctcgtctcgacccggctatcgctgtggaacctgtcaccgagactgaagcacgtcgcgtgctgtggaaaattgatctgattatcattcccttggtcatggtgacagtggttctagctgctattgataaagttattatctcaaatgcggcgatctacggtatgaaaacagacactcacttgactggcgatcagtactcgtgggtaggctcaatcttctactttggatacctcgcctttgagtaccctgcagcactgctcatccagcggcttcctgtggccaaactgtatgtgggaatggtcttggggtgggcaattctgctgctatgtactgcggcaacgcagaactttgcgggcttagccacagtgcgcttcttgatgggcatgacggaagccgctgtatttccaatctctagtattttgacggtaatgtggtggaagacaagcgagcagccaattcgagtcgcgttttggtttaatcaactctcctccgtcttctcgggcctggtcagctacggtatcggccaaacaaatacggcattaggcccctggagattgctcttcattgtgctaggtgtcttctcctttgtctgggctggagtcttgtatatcttcttgcccgattcgcccgtgaaatgctggtatttctcggatcgtgagaaattcgtctgcctcgagcgcgtcaaagacaacaataccggcatggaagacaagaccatcagatggtaccaagtgcgcgagtgtctacttgaccctaagacttggcttctggcgctgttttcgctggcgcagaacgttcctaatggtggtctggtgaccttttcagctattatcgtgaccggtctggggtattccccgttgattactactgtactgggtatacccaccggtgtccttgcaacggtttggcagattctgttgggctttattgcagctagcgtacccaactcccgttgcaacatcattgccattgccaatctggtccctatggtctgcgcgatcctgatgtggaagctgccacgtgagaaccagcaagggctgctgacagcatactatgtattctacacctattgggcgccatacgttctgtccacttcgcttccaatggccaacaccagcggccatagcaaaaagttgactatgaacgccatcttcttcttggcgtattgtgttggcaatatcattggtcctcagtgtttccgttccgatgatgcaccttcgtattcccgaggatatgagggtcttctgggctgtcttgttgtggctatagtttccattctctcctatggagttctttgccgatgggaaaataaccgccgtgataaggaagcccagtcaaatgtggagacatcggaagttgtcgcattttcagatctgactgataaagaaaaaaggtctttccggtatacttattagtgaatgtgcgtggagatgcgggttgctgttgataaggatggatatagtgtcaaatgaggagacgttcaatcagacatgttatctttggcataaccttgaattgctaatccctgaataatgtattgtcagtcccaaggacatggcatcaaggaaggttaggtgtctgggtaattccttggggaaatagatacttggggtaaagaatgcaggtcgaaacgagtactatccactcggagaatctccgactaacccgagctgtgagacctttatcggaaggttagaacgaagcagtagatttctgccccgcacatacgaatatattcatggtgcatacaattgtgcgcgaggaagctggtagcgagatgagatgctcagaaagtaggcggcttggagcaaaatggctcaataaatatggcgggaccaccctcaaagtttgagagattaaatcaagtcacggaaccaattcaactcacatgatggaaaaagatgcgcgaatcctcatcgttggcgccggttgttttggcacttcgaccgcataccatctttcacagcgcggctacacttccattcgcgtgctggatccatacccacctccctcctgcgaagcagcttccaccgatattagcaagattatccgcagcgactataacgagccgttgtatgcacgtcttggaattgagtcgattgaagcgtggcggtcttggccgctgttttatggtctctaccatgtccccggttggattctcagcgcggcgaacctgtctcggccctttgtcgagggttcaattgagacatgtaagaggctaggagtacagggtcttgagaggctcacgccggaccagattcgtgctcgcttctctgttgtcacgggcaagttggatgggtggaatatcaatgtgtggaacccaacggccgggtgggcagctgccggtacagctatcgaacggatggcaggtgctgctcagaagaacggggtaaaatacatttcgggggagacaaaggggaaagtgcaagagctgatactggatgataccacgggcaagtgcaagggagtcgtcactgcggatggcacgagacacgaggcggacatggtcatcttggccgcaggagcttggacaccttcactgctagacgtgaagggtcagttaactgccaagggacatagcgttgctcatatccaactcaccccctccgaaacgaaacattatgcctcgatgcccatcatggataacctcgagctgggatacttcttcccacctcaagaagatggaatcttcaagatggctcacagtcaattcatcaccaatgtacaaaccacaaagtctggtatcaccacttctgttccgcatacattcattcaggcacccaccgatggcctccctcttgagatcgaagcccaaatgcgcaggaacctgcggcgcgtgctgcccgagcttgcagatagacccttctgctatacacggctttgctgggatgctgatacagctgatcggcatttccttgtcgccccccatcctactcacaagtgtctcttcctggcaaccggcgggtcggcacatgggtttaaattccttcctgtcgttggaaaatatgtcgcagatttgctcgaggggactcttgaccaggagatcgtgcgccaatggcaatggagagctggacaaaagagcactgcgaaaaacctggcgcacttggacccagagatggagttgagcgaccttacaggctggaagggtagacagataggtgaaagtagccatgctgctaaactatgatcttctgttggtgtctgagaaatcaggtatctgtggatgattcgctgaaacacatattttgatagatagatctgaattaagcagaaaattgcgactagtaatatctgctattagaacatgttcaagggcttgggccatttgacgaatgtaatctgagctgcacgagatggctgtttccttgccaagtaatttacccttcccatgcacatgcttaggttctatgtcagccggagaaagaaatctcaaaggtgcactcgattattgaagatatcagcagttctgaaccaaataaggttacgctcgacaagatggatggatactgcaaaagcttgcaagccgttgccgatcgtctgtctagataggtgagaggagaatggagccgaacaatgaagacacagtttggctattggctattcaaattgacatcatttcgcttgaacagaaaataaacaaaaccctcattaaccacgtagaagctcaagtcaagcttagtttccacccgcccagcatgaccattgcatgctcccatgagaaacgggcttcttgcaagggatctttctgctgctgtgtattgaccctctggagttttctttcatcttgcacggacagatcccgctggcgccaaaccatttcgacaacttcaatcgcaggggtaatgttctaaggaacgggtgacatgttagtcaactaacagagaaagagatagaggaatatacataccccaaatcgacgaataccctccagctctctaagcaattgcaacacaacgaccctctcctcttccctgtgagcacagcaccctgccaagaatagaggccataaaggcgtaactgcggtacgcatcatatttactttcttttccaacatcaaggtcaatatccgttcaacatagacattcttctcctctgattccagtgtcgggataccagagcgattaacaggcggtttggtggaacagatctcgtgcagaagaagaagggccccaagcctatttgcttcagcgattgcagcacactccatgtcaggatcgatatgttctgtgggtatcctttgttgaagactatcgaggtccgtcttgagttgatgaacatctttacggctgatttttatggtgccatcctcacgcgtccacgctagttcggctacttggtcgatcatcaataagagagcagggctcaatcccatgtatggatcaatcatatctgatttttccagtatactgtccggcagtagaggggatatatgggatgaaggaggagtgatccgaaacgccgtgcgggctagaactatgtggaaggcgaaatagcgattgaagaaactcgccaattcttggctgtgacatgagcgaccggggcgatcttttcgtgtccaaattaaattttggaacccgttgagatgggtgacccatgaaggacgactgctatctgatatctgcaaggaattaggaggctctctcgtcaaggaagcaagggtggtcatacatcaaaccagcataacatcaagaccagaccgagcatttcatccagctcgttttccgtccagttgtctttatttaatagactgcgcaggtgatttattgcccgatggtgatgctccaaggccggaagccggtaccgctgatctgacagcttgagggtgttggctgcgatggctaaggcggcatgatatagccccttggactgtagggccatggggagtatgagatatcgatatggattgtaattcgcattatcggccagagttgaactgctgcagatgatgtgttcgaagtaggacataagcacaggatcgcaatctgatcgctggccaggagagatggtattcagccaaggcgacaacgggcttggctgaggagatggtttcattcctttgtaactgggctgggtaccatcgaaatggatctggagatcgatcatagtcgtgttcaaaaacatccaggtcctatcagcgcccgtatgctcaggttgtagcgatagtttatcgtccacctgctctaacgattccttcttttgagcatcttttcgcttggaccacacgcctgcccttccatggcaaatgcctcgggctaaagattcctcatgccagaccagacgaagtccgtatccgcatggggcattttgacgggcgcaacgacggcagactggatgagtctcttaacgagtttttgattaggacggtgcttgtgcaaggttttatggggaattaccatcgcatttgatccgtcgtgctcgacatgtccagcagcctgtacgagctcttgaaatcgcggtcattctttaacggctaccccgcatgagtggaggattttctcctgttagttatatgcgagccaaggagataagtacaaagtattgattggcattcgtattcatattcattcttattcgctgacattggactatccactctgggatttatcttctgctttcatgtgacaagggggacttcgattgggaatctacttggctataccatcccaaggttgctagttgataagttgatacctatacctaggtaagatgattgaaatgacagatgagtgccttcatagctactcggccccactgacttcaagtttacccttttaacgtccaacgtggatatgggctggatacatacctcaaaagccccataactcacattcaggattacatacaacttatttgtatcaaatcaagtgcagtctcggaccggggtcctcggtaaaagcacccaggtgaagtgcacggggataaaacggataaaccccccacactataactgggacctttcagccttccaaggttcctttcagggggtttctccacatcagctcaccatgggattcagcactacggccgaatttgatcaggtaaatatcatccatactagccctggaggtatttaaggtcgctcacattctctaggcgtatcaaagtgtccagggtgcttttgcatctggcaccaccaagaacaaggaatggaggcgtcgtcaactgaagcgtgcttggtggatggtcgaggacaacaggaagcgcatctgcgatgccctttataccgatctgcataagcactatcaagaagcctacaccggcgactgcgctaatactcaggccgatattcttcgcactctcaaaaaactcgatgagtggaccatggatgagagaccggaaaagtccgatcctctcaacttcctgggaagagctactgtccgcaaggaacctcttggtgtgactctgattatcggggcatggaatttccctatcactctgctcctgcagcccatgattgccgcgattgccgctggatgtgctgttattctcaaaccgtcggatgtggcaagtgccacccaagatgtcctgatggatattattccccaatacatggaccaagacgcgatccggtgtgtttctgctggtccacaagaaatggggtacatccttgaacatcgctttgaccacattttctacactggatcccccaatattgccaaaataatccatgcagcagcggcaaagcatctgacccccgtcacactcgagttgggtggtcaatgtcctgctattgtcgccgagtcggcgaatctcgatctcactgcaaaacacattgccgcaactaaattcatgaatgctggacaggtagacccacaccattcacccccggctatcagaagctaactcgtcttggctgaacacagatttgcttgaatgtgaaccatgtcctggtccacccgagcctacgagaccgtcttgtcgctgatttgatccgacactttgacacgttccttggaggcaaagacaacaacccggagtattacacacacatcatcaacgatcgcaacttcgagcgccttgacaatctactccaacagacctccggagaagtcgtctatggtggccagaggattcctcaaagtcgatacttcgcaccaaccatcgtcaccggagttaagcccggcgatccccttctctccgaagagcttttcggtccgatcctccccatcgtcgatgccgacttcgataccgctctctcttggacgcgtgcaggagagcatccactcgcgatctacgcattcactactcaagatgccgacaaggctcgcatcttgaacgaaacccagtccggaggcgtgaccttcaacgactgcggtctccatatagctgctcgtgacgtgccattcggtggtgttgggaactctggccagggacgttatcatggcccccatggtattctgactttctctcatcttcgtacacacatcaacgccgtgccttcgtggatggaggcgcttctcgctgcacggtatcccccctactcggtccagaaggctcacaagatgatggcacccgtcaccccgccgtttgaccgggatggcaatgacacgacttcggctgtttcaaagtgggcctttggcgttgggattctcacgctttctgcattgttcgtgtctcgacgggatcagattgtcgctgtcggttccaagtggctcaagtaacttcgatgtgtatgtgtagcaaatggaactcttatctcccttttttttggagcttacgtatacacgtatcgatgataggtggaattatatcttgcagatctctaatcctttgagcgggggaaggtacaaatcggcaattctccggaagccaaccggcatactcggagatcacggcgaatcaccggatatcgttgaactaaactaatacgataggcatcggtagtatcaatacagctaagctaaaacgaggtatgccgaaagccaaattgaaaagactataaagacagcaaggggacagggggacgtagagcgaatgaaattgcgcttctttggcaattcactctttgcctactattttcatatcggggcatctcccacacatgatgaagctatcactggttctcttgggattgaatgctgtccaaaatgctggcattgtctctgctgctccactagacagctggtcatccaggttcggtgcgtcgtcgcacgcggttgacatgttcaatactgccatcgaatggaatgacaagtactgggatgacgaggccggctatctgattacatcaaccagtagtcgtggacgctatgatagtcggcatacagcctggtatgcgccccaattgctagcgagaaacgggccaggcgatgttgagaaagccattcgtatcttcgagaatgtcatctctggtcaatatctcgatccatcaaaacagtggtatgggaattatcaacaagcgccttcagagccggagcctgggacactgaaatatcccgatgatggcccatacagctcggtaagccggtgattcctggtctagtccactatgttgctaatacggatatcgtcagtgggatccaaacattcgtgattttgtgggctgtgcctggatcgtggccttgaatgattatggtcacctgctcccggcagcgacagtctccaaggtggaaaggtccttgcacatcgcggccaagggcgatctctatcgtgtcggaggagttgatggcgacaattcttatccttgctactccaatccttggctgatgcgaaccattctccataactgggttggcgcacgagtcggagatgcgaacttgacaaggtctggtgaaaccttcgcacaggaaatctacgatctttggagcatgcaccacacgttgtctgaatttaattctccgacctacgctggcgttgccatgtgggcactagctctctggaaccagtacgggacaagtggcagtttgttgaagacctatggaccggagatgctcgaatacagctggaatgaactcgctgagctctacaatgcaaatctgaagaatgttgctggcccttgggatcgctcatatggctatgatatgaaacaatatgcgtctcttactggcgctgttatttggggcgttattggccgcgaacatgctcctgtccctcagcaggaactagggatgtttcatcaagacgatttcgcgttctaccctctgttcgctctgtcgatgcctgaaatggtgaactctctgcctccaaaggcaaaggcgaacttactcgaattccccggcgagcatatgtatacttcacaggcttactcgccgcccttcgatgtttaccctcgcaatatcactgcttggatgtccaaggacgtgaccattggcgcagaaacggttgccgagacagttgtcggaggtcccgctatcaaccctagtcaattcaatcctgccgtcattcagtgggctattgacgaccataagattggttgcatttcacactgggtcaccgagtcgtctattcatgccgtggccgcccctaggtctctgaacatctcatatccaaatgcaacatctgcacatggcccagtttccttcaacttcttgttcagtggtctcacggttaacaacgggttcaatgtgactggactggaaggtctacctggtttgaacctcaagatctcgacaaatgcacaaccgaattatacgatcacttacaacactgatcactctgttaacgaatttgtgttctacaacattacatatacgatgcctgagagtttcaccggggtaccatttgtgtctctccaggtagtctgagcgtctgtctggacaggatatcataccctttgtgttcaaaatcaatgtaaatcttatatgctatataattcacaatgcgtatactatccagagtcacatgtccacccaactccaggaatatgtaaacatcactcgtcctttttctcctcagactgaccctctccatctgtcgactccaattgcatccgaggaagccaaaaacgcgcaattacaccacccaagaaccgctggtcaacccacttgaccaaaccataaaggatccaaccccatccccacatacacatgcccatcatgctcgtgaccagcaaaacaggaccaagaatgagcaacgacagaacagcccagagcagtattgacaccacagcgaagaccaatacgccagccaaaaataccagtatagggaccccacagcagatcatttgacagacgatcaagcttgttgctgcagggcgcttcaatgcagcttcgtatattgcggcttgacggggcggagggagcagccaggcgaccagactctgtatgcaggactcaaagtaatcaagggcccgggggaatagcgtacagaaccatgctgtgatggtggaccatattgatgaaaacgagagattgttgtcgatgccctcgcctttcgggggagcatcgtccgaagggaattgacctgggacagcagggtcggtcaggtctttggttgttcggtttagcttttttggtgcgcttttcttgaccactccgcttgttgttgattggactttgtcgacaggaagctgtcccgtcacactgccggtgacattatcgaggggcattgcgggggctgctgggtgtttatctgtgatcaatgaaagtgtaagataggagaagcagagacggaggtaagctatgatctagtaaagattagttgaactctgcatttaggaaaccgtgagatattcgaaatatctataccaacgatcaggtcctagcatgacgtatggggcgttatgtgaactggtttgcgccgatattatttttgcgtcaccatagcagacattttacttgtccgggatttcatcagctgatattctacaatatactgactcgcgcttgaagaccggcaagacgtggaaaagcggcttatccccatggattttatcaacacggtgtggggtgcgcacagcagaccaatctaagctttacacatgtacgttgaagacattcggagcagtagatattttatatgactatcatatttaaaacagagaacaacctcgtcaactatgtctttggggatatatgaataaaaatgtaataaaaacgaacgctatgctacgaattattggtcagaagtgccttcgcgatcgtcaaacatcatgaaatcggcatcatcagcctcatctcctacgactattttccaagcctcttttacaagatcaagggtgtcatcttcgaatgccaagtcgaggctcgatggagggaaatgatagcagtcaggaattccgtcctcaacagtgagacgccggggctcaccattgctgagacgaccgctctgggtatatcgcaaggaccacaacacgcgggcaggaggtccctccgcctgaattagtctatcgacggcggcctcgataagtgcttgaccctgcgggccaggcagtgccacactgcaatagataacacctgtgacaatcaattagtcacacgaacgacaatattggtgacgaatcaagtttggaggatgctcgtgatcaggtaaaaaggttttcaacatagcaagttcaggcaatgtagataagtttttgaaaaaaatcatcatgcgagcggggaggaaaaacatatcaggcaagactgcacacgggatggcttactttgctggtgtggacactcgccagtgtcgctcgaatgaacctgaaggtagaccggcggggacttggggctccccaacgtatcccctgggaacatcagaactgcagttgcgggcacaggagcaccttcgactgcaacagggaaaagagacgggaaagtagccgacacaacactgatcgagcgggcgacctcgaccaagggggttgagctctctttgggagaagtatccgccgccgaggtaaacaagcatttcgcctgaacagacccttggttggaaagcttcaatagaaaacgatgctcggaatattcagagccgtagcgccataagcaatcctcaagacacgtgtccagggcatatacaccccctcccacggcggatgcacgacaggcagcttgcagtagttcagctccaccgccatacttagcaaccacagctccgaatccagggccaagatggccaatggatgacagatgtctttggattctgggcaaagcatagctggcgggagtatcttgctgggacagctgcgacagggacagcgacagcagaggattgtgaagttcttctgggacgctgaactgggaagctagataatcgtttaatggcattgacgtatcgtcgccttcatttgaagcttcatcctcattgggtttagtgatatgacgcaataatcgcatgagggttctcttggacttcatgctgatatgacttgcagcaaacacatcctcccggttgccaggtactcggtagagtactttttccgcaccgagctcatctttttcacaatctggatgtccaggtgcgtaaatccaccagcttccaacagccataaactcaagctggcggaagacttttgaggatacaagcgctgacattagttgagaacgggcatataggaaatagggggagagggacagagtataagcacgactggatgcaagtttgggagaaatgcttgtgcccgcggacggagatgcatcatgtttgaggatcgaggcatctttaaatggtgatgtatctgtgtctatttggtaacagaatattagcctcgaaccaaccaggcacacacaacaggaaactcacctttatggaccttctctacccactcttgggcctcatcaagactgaaggctgcatctgaaccaccatagtactggtttgggtccatgtgaagaaccttctttccagatcgtgagagtgccctttgggagtgtgagtgcaactcacaaccaccctaggatagtcactcacagtgccagaagtgactgggaaaccccagtcccaacaatgaccacatcccaagtcgtgtctgacagagtttccatggtatggaaaatcaggaacaaagtgctagctgcaggtaagtctgagtattacagccaagtttggcagctcaagttctcatgaggttgagaactgggatatttaattcagttgaaatatgccctgtctttccataggcttgaatgctggaaatcccacaaaggtgaggttgttgggggaaagaagaagaagaaaagaaaaaattggagcgaaaaacgcgggaaatgcgcgtgaaggcggtcacccgccccacttcagtcaacagccatcttgaccgtaatcaactcagttactgacgacgatgacattgcaacgagtcaattcacccgactgctaaaactgtactatcaaagtgaatcatacaaggctagctttgcagatgatttcgtgcttctctcacttccgcccgggaaaaccccaatactatatgtttactggaatattggcgtgaaagacccagggacatgggagaaggcaaatagagaaagcaagttgcaagatctgcctccagcccatagcgctatatatgccccggcaattgagcctaccctgcagaccggaatcgaggcattggcttcgtctgctttggcattcgaagttctttgatgacacttggctgcaggttacccgtgttggaaaaagaaaatggcattcagtgagaggagagggaaactaaattgaatattataaatccatttcattcgtttttgggccttctatcattcattaaaccctctttgatatccctatacgctcgataaggatataactatcaaaagactagcttttctccattctacttcccatccagccctgggctagaagcagcagtcccgagtcccagatctcaggaggatcgtctcatttatgtcgttgtgcacgattatcaacggaaccatcaaatgccattactttgaccacgaacatatatacctcaggtgcgacttttctcattttccttctctgcggccctgtggtcatggtctttcgcttctgtttctgtcctaccatcttcacccagcttcacattcttacaataagcgtcaatgaaagtgaaacaagggctgcaatcgcaagtagtctttgcgactctcgatagctgcgattgatggcatcacgagcttcggtgcccacggcatattttcgagctaccacaattgatccgaagatagacttcgcttgacccttcacttcattaggaagatattgctgcagcttgcctgggagagtgtttctccatattgccccggcgacactattgaaagcatccattagaaaggactcaaatcgatgactgggtgtgctgcttaccttgtcccagtcgcaccagccacgctcattgacgcgaagaataccgcgctaacaacgaaaacatcataacctaactcccccctgcgagaattatggctcatctaaactcccggatgggaagtccaaccctcagaagtatggaggtgcggatgccttcctccaattcatgacggacactgtttaccattttgtgatttcgtcgacattccctcgcatatcggtctgccagactgctttattcggacactcttttggagcactgtttgccctccatgcggtatatacagcccccgtaagtttcgacgcctatcttgctgcgagtccatcaagttggtggaacgatggattcctgttgcaggtagaaaagcaattctacaacatgccagaatcacctcaccagccgagtgtttggatggcatatggagcacttgagcagtctcccgtgcctcagaaaaatcagtccttggaagaatatgagaaacggttggcaatagccaaggaacgtctaatgggggatagttgtgactaaatgtttgttcgacttctgcagagtggactggtacggtcagtcgtacgaagaaaatatgaagatgaagaccatggcagtgttattgctgcggcactgagcggagctatcttctatttccttggtcaaggggacgaagaagagtgaatgactatagccgcagcaacttctatctatataacccagccgcctatatggatgtgggactttaattttcgctcttcttttcgctcttcttttcgctctatattccatgtaactagttactaacactaaaggatgctgttttcagtagcgccccacatcggcttccatgttgaaaacatcgtgatgctcttccacacctcagatcgagggcgacaagggtgattgacatatcgtaatgaaagggcccacaaagtacgggagtagccataattggatttcgaggatcatgcgattagggctggaaagagcatctggatgttcgccaagaacatttctgcctaaggctatgtattactcagcgtttcccaaagaggttaggctgcacggctatatgaaccgaaatttcggcggaacagttttctctctccacaccactcccggtgttctgcacagaacgggttactatactatggtagcctggtcttcattggcgtagtccttcactggacttcgcttgggagtggtagataagatttcttgtcactctgtatctgctgctcttgatggagacatttgatggaagcggttcgttttgtagtgatacatccataatctcattattagagtggtacattgctatgccactctgatcttgtagtttgtagagccaggaggcttgcatagagcaccttgagacaataacaagagaatgctgccccggcctgacttgggccgggcgcgccgaaggttgtgcctgcaacctgcatcgcagatggaacctagactctccaagttgggcaacacctgtttttcccgggagaagatacttgatgtgcatggccctccaccttaatccgatggaataagccgcaccggcgcaactctcactcttgtgtgcctgcttcaaccacccgagcccgaatgatcttcagctcatccactggcctgtcctccgcaccggtcttgactagtcccatacgctggatcactctcatgccacttttcactcggccaaaaatggtgtggtttccgtccagccagggtgtcggcgcaagagtgataaagaactgactaccattggtattcggtccgctgttcgccatgctcaggattccagccccggtgtgtttcaggtctccgtgaatctcgtcctcgaatttctcgccatagatagagctacctcctcgaccggtgccagtgggatcgccagtttggaccatgaagtcaggaatgacgcgatggaagatgacattgttgtagtagccacgttcggcgagagtcgcaaagttcttgcatgtctgaagagcaaggcattagtgagggttccctagaagctgcaaagagctcataccttcggtgcatgggtattgtagagttccacggagaaggagccctgcgctgggttagcgagtgaccttgggagaacaaagaggcacaagttaccatagatgtgtcgaaagccacttcagttgtcatgatgaatatgtgagcgtagaatcgtaagcagagccgagagatgagagtttgcgataactgagggatcaaatcaattcccagtttgtctggcagaaaaatggtaccgccctagccatggatgtgataattcttttccagaaaaggaaatatgcatacagcgtatgataaaagacagaaagaaacagaatctagatacctatgagcttggatcttggaagaaaggatgagatgaatcgtaataatggataatgtaaaagaaactaaggtaatatgcgtgtgagcagaaagcggtgacgtagattatgctgtggtgctaggaagctccccaggaaccttggaaggttaacaggttaccgacctcaaagaacctcccactttaccaaccctttgtggccattatggtctgattcattcattttttaatttgtttattggcttcaattaactgtcacttgccccgtacttacggtctataatttcctgcccaggtgtccacaatggccgacgtcagccctatcgccgagctacttgggcaagccctctaccacttcgaccgtctgaggccacttcttccaacttacggacacctacttgtttccgctctttttccaatttggatcggtgcacatgcatctttgacaagaccttcctccgccactaaacctccgaagaaaaaggccaacaaggataaagatgaatatgacacggatgatgaagaggggcatggccctttgcagaagatggaagggcttgagccgtcagacgccctgatatttccgttgaccgcgggactcaccctcggtggtttatacttggtgatcaaatggctggaagatccggccattttgaacaagatccttagtttttacttctctcaaatgggactcttctttgcatttgcattcctgaaggatgtgctactgatggcccgttcatttgtttttcctagatactatcgtcaaggtggacacttgtggaaagcgaaacaatctgaacgccttttcatggcgtctgaggaccatccagccaagttccgacattcacctcttcctgggattttcagtcgagtgcccctcccgtgtatggtacgaggactgctctggaaatgccgaaatgtctgttaccagcgtctcaaggtgcgagctcatatacgtggtttatttgacgtcaaatgcctcgttggtctccttgatatcatcagcgggatctccgcattatctgctgtaggatacttcgcattcgtggaaaacccgtggtggttgaccaacttcctcggtttctgcttctgctatggcaccctgcagttcatgtctccctccacgttctggactgggacactcattttgggatccttatttttctatgatatatactttgtcttcttcactccattgatggtcactgttgcaaccaagttggatgtaccaatcaagctcctctttcctcgcccgcccaattctcgcgatgctcctggctccgtgccattggccatgcttggactgggtgacattgtcattccgggaatgatgattgggctggcacttcgcttcgatctattcctatattaccagcggaaaggtgctcaaatggcacgccccgaagggtcagaccgggcaactgtcaagcctgagtatcagtcggcaaccggcgcttggggagagcggttctgggcaccatccgtcaagccactccagccggaacttcagcctccctatcacgatgcccggcgtttcccaaaggtttacttcaaagctagtatattcggttatgttgtagggatggtcaccaccctccttgccatgcaatactcaaaccatgcccaaccagcccttctctacctggtaccgggtgttctgacatcgctttggggcactgcgcttattcgaggtgaggttcatacaatgtgggacttctccgatgctgaggaggtggaaattgaagaggaaaagaagccagatgaacctgaggaaaagccctctcctgaagatcagaagagccttttcacgcgcatcttctctggtaattacctgcgtgcatcaaaagaagagaacaaaacacggaccgaaagacccgaagaagagaaaatcgacggcttaaaatcaaaaactaaaccgtctgaagaaggcgggcgtgataccaagacgaagaagcccaaaaaggaccgtgacagttcggacctgatctccttctccatatcaattccttgcaagtccaaacgtgaaccccaggctaatctgtcgacaacttccacagaggaagaggatggagatgtgtctgtttccagagatatcaacggggacaacgaaccgccgttgaagagaaggcgacgcagcatgatgagcaagaaatcagcaaattagagatctgatcaattggtcggacaaagcgcatgtattagctgaaatctagtatttcgtggattttcgacatggcagccactgtgtagaccctactccgatgcatagctctatttagaaacaaaatggcaagaaaatccttgtagtggtatcattcatctgtattgcacatcaattcgatcagcattgatccagtatccgcttcatctcatcccatctccgagcagaaacatcaacaagctggcgcagatcatcactgtccacagtccaaccaccatgcttttccatcttcacaatgaccgtcttcccgttctctttatcaacaactacagaagccctttcttgactcaatccctcctcgtatccgtccggatccgcaaggatccatctttgctgcgcacccttcttctgcttttgctcttcggcatcgggaatgacgaccgccctccaaccagcagcggcatcgccctcgaaagagcagaatgagctagcaataggcaagccacgcagagacaactttcgcgcatcggcaacattgtccgagcaaagaatcgtctcattatcagcatcccaccatgccttgggaagctttgtgtcccgaagcgcagccaagacagaggcccaggccgcgtcgaatgggtttccggccagagaaatgatcatgacatcaatgtagagcacccagaatgccttaatctcccgctcggagccctcgctctgttctgtatccacgtccatcccctcgcccgcattgcggaattcctccgagtccagattcggtggctggtaccagatgcgcaagtcgtctgctcgcacgagacgagtcgagtgaaggagagaaaggatttggtgcgagagtgactgggccagtgcagaaggtggtgcaccgggggtaaagcctggcgcgcagccagtgctgagggaaaggttgggaacaagtaggttcagatcttggatgtggcctcgatcttcctcgtcgtgggtctctgagactcctacgtcatttgacttgtcaagattctgctctgaagaggcctgcaatacgctccaggaagcgatgtccttggtgtgtaggatctctgcgcgaacgccgcagacagcagctgtgtcgccaattcgcacgactgcgctgccatttgtgtgagttagagagccagcattggcagatgtgacacggaattgtgaggtggcacgaccattcgcgcggactgagggctggttgctcgctggtggaggagagaggtgggcaagaaggtaggcgtggggttggaggcgggcgaattgagatggtggaagtgataatgacggaggtgtcgggttaatgggagtagtggaggatgtcatgacgaagtagaatgtctctacttttgtcagatactgatatgtaaattatcgaagacacagaaaaagccgacgagcataagatggcagaataatttattatcaaaggcggccagagctaaattgtcagtgatacctcaggcaccaagtggagtttatatgccaagacttccgcgcggcccttatgtgtacaacactgtatattgtagttttctaagtattcttcatattagaagaggagcgaattacaaatgcatgtataacggggtaaatattccaatgttaagtatgacacggcagttgtctgctgtatactccgtacaacggggcaagatcattgccgttacgcagggaccgacgcagggcctcatctccagagtcgacatgactccctcacagatgttgaaaggttggcttttctaagtggccgggaggcatggtactaaagttctgccatttgtcaatatcatactgtggccgtcatcgtcaacggaactacagtatactactggttgctatttgcttcggctacgtatactccgcatagccaggttcttcgatctcttcgcgctatagccctttcatggagtcacagacactaacccagttgctcaagcctacttatacatagttccttacgagtgctcccataatttcggccaataaccggcacgaccaggcggagattatgaaccacgcctgcattatagttcaattataattggatgggtattttcgacatgaataccaccgagagaatgataacctgagtgtcctgcatcttccccaccacgctaatgcggctcggtcacccccagtcactctactgctgatatcgccgcctgtgattgggcttcagagcgctaaaccgtcacatatcactggaatatccttccgtatgcactccgaccactaccaccatggctagacgcctgtgctctcataaatcggtctgcaatcgtgtcttccattggctcagtgtctggccagccataatattccattgttgggattatgctatcacaatgccaagcatgcaagcttgtgtgactccccgcttccatttttccatacatttagacggaatttccctcggaaattgcttttcttcgtgattttgatgacatgaatactgatagttccagtgaaattatgaactcggtccaactatagtacaagagaggaagcctcttgcgcgcgggtgaacctaaaggtatgatactccgtacaagactctatattgagatcgatctaactagaagcaattgcagaacaaaatatcgccatcaagcgttgccgaccaacgcacaaaatgctgagcactatcgccaagcgcatcaatgtcgcgatcacggcatcgacgactgcagccgaggtagctgaaatgcagcgagatccatggtcaaagtcggcaaaatacggagtgggatttgtctatttcgccgtcgtactgctggtagtcacgacctttatccgatgttggcataaatggggcgacaagatgcgaattgccctctataaagaaaaccgaccagagatctttcgcgatgactcggtgccggacgagtacgaactcccaagtgcaggaactgatgcttccaacgcccatttctttccatcgccgaccgcagtctccccgcctaagaggcgtgaatcgattcttgctacgatagttcccctgaacaaggcaattgcctttacgcgatggatcttctaccgaccaattcccgtcctaagggctgggaagatagagctggttttcccgtctctggcagttacggcgattgtcttggttgcatttatcttcgtcacattatattgtttcgtgccacagcccttatactactggtcgattgcgctggggtcaccgccactggcgattcgggcaggcatgctcgcagtagctatgatcccctggattgttgcactcagcaccaaggcaaactttatcactatgatgactggccttggtcccgagcggctgaatggcttgcaccgctggtcagcctatatctgcctcttccttagtttggttcacatgatcccgttttacatcactccaatctgggaagacggcgctttggtcaactatatcgtaggcatcccaccacacgcctatgtgtatggaactggaatcgcagcgctagttcctctgcttgtgctgtgtatccactctcttccaatctttcgcaattggatgtatgagctttttgtctttgtccatatcccagtgtcgtacatttttgtagcgatgctcttctggcacacgaggaactacttgtcatcatgggcctatcttttcacaacccttgcaatttgggctatctcatacaccatccggctgttctatttgaactggacgaaccctttgcgttcgtcgtttttgatcggagaagagtcggccataacccttcttccacaaaatgccatcaagatcaccattcccacaaaaatgcgttggaagcccggacagtacgtctacctacgtctgccgaggatttccgtgatccagagccaccctttcacgatcgcctctctttgtagcgacgacttcccatctgcttatggtgagaagtatcgtgatatgacacttgttttccgtccatttcatggtttcacacgtgaagtgttccagagaaccttggaacatgggccctacaaaacatacagcgcatttgtagaagggccctatggtggtatgcagcgcgagatggctgcttttgacgacgtgattttctttgctgggggaagtggtattactgccattgcaagccaattgctagacctcatcaagaagattcgagatggcaaggccatcactaagtcggtcaaagtgatttgggcgctaaagagtcccgagacaatggaatggttccgagaagaactacgaatctgccgtgactatgcaccttcgaacatcgtgagctgtcagttcttcctcaccggagcgaagcaagacaaccgagttggacgggacatggtccaggagaagatttatggcatgctccagggcattgataagcgaaactctgcgtatatacgcgatgaagctgccggcaaccctgatctagaaaaggaattgcgccgtgagaatgaagacggtgttgctgcccttcccaacgcgtacatggccactcatgcgtccaatacccgccaatattaccagccttccatcaacccccatgcccccgctgcatcaactggctatggcaacccaaatttcgacttcggattgggcgcacctcaacctatgccacaaaggccaccaccagcacctgcaccacggtttgcctattatcagccacgtggtcgcgataactggcggactgattacttccgtcccaacatcactcagatgctcaatgaattttccaaaacctttggccgtcgtgcgtgtgttttcgtctgcggtccaccgagcatgcgagttgaagtcgccaacacggtagccaaactgcagatgcaggtgattatggactcgtcaagagacgagatctttttgcatgccgagaactataacatctaacgtagcgttgctatcttctgttgatttgatacccatggcgttgtagttatatgaatactatgccagttcttttaatgctcaacttcaagcatgtaggagtgtatagcgagagatcatttgtcatgttcaagcaagattataatcaccgcatgcagcgggaattcaacacatgcattcttctaaatcagatgtataaacaaatgcaaagggtatccaaggtatatcagaaagccacacacacatgcaaagcacatctcactcgacctggggcttgtggttgtcgtcttcagccttgcgcttgcgcgtaggcgtatcctgcttttcgaggacttgcgactcgttcaaatgctgtattccatggtcgtcttcctcatcatcctccgcctccaccttctcccagtcctcatcttctacctcgtcggaggaagttgtagcctgagcattgctttctgtcgaagcagatgattcatcttcctcattccagtccaaatctagtcgtacgattttcgcgcccgacggcttcagacgccgatagtattcagctacatcaccgtcaaccctaaacccacgcgcaatataccattccagcccctcttcgtttgcctcatggacgtgtgcggtaacagagcagatgttataatgcctgacgagctcggacacccggtatgagtccttgcccttgctttccggtggtgacgcaaagagaagcgaattcaacagtgatgctgccacaccacaacctcggtatggcgagagaagatgcagggtctgaatgtagagatttgtgggacttccattctcttgtatttgggtctctctgtttgagtcctctgtctgtcggactctctctaggcgacaccgaatgccgccgatcaccttgtctgtcccgggagatgcgccggaccccggggctgcagcaacagggtggtcatggtaaatagcaacccgtgaaatagaagcaatcactggatcggtaatggtagctgtgtagaacgagtttgggtagcggatgggaaggagcaagcccgtgatccgcgtcaacgaagggatatgcgcagtgttgactttctcgactgtgatatgggggtgcggagtcaccacaccacctggaatatcatgaggatacgggagaaaggtctcttccttcgagcgtttcgggccagacgtatttgcgacggctgattgaggcggctggactggaggggggtggatgggaggccgcgcagcatggcggttggtcggaggaggagacagcgaagtcgaagaagtcgctggccttatctgattctttgcaaacagctggtatgccattttggagcgagatataatggtttcgtgaaagaacaagcagagaggcactgcgaatgcggagatccgataagagataagcccagtgaacaacttgctccagcctcatccgtctcttcatctccccgagtgatatttgatttgcaaatagacacctcaataggtcagtgccttagttgttgttgatgcctgctccctattgtttgtgttgatagaacacattcattgatcacactgccttcccctattattgctggttattaatcctacctcatccctcattattgaaactcactgacaataggccctacactaggccatacaattcaggcctccctattgtcgtcttcgttccttttgtttcggcttctatgttttggacttcctctttcttcttctctcctacatccgtgcacccattgcgtcaaccctgcatagatttccggtacatggagaactaaacctcggacctagcggttcggagcactcactacctgtgtcgcgggcaggcacagccgtcggtcaatcaggaccggacgaggaatatttggcgcatccatctccggccgcgatccgaaaatggccgactccaacagcagcggtggtcgcaggccgacctatcctgccggaacgatcgccaaagtggtatgatggccctgagtgaacttcatgggtcgtgcaatgccagttctaataactatattttttttaggctaccgacatcctcaacgaaacattccagaacatcatccacgaccttgtggccaaagtccaccgcgaagagaaggtggcgcgcatgcggtccgcggtggttcttgcccgacagaaggcggaggaagacgcaatcatgccggatgaagcacctagcaagacctcgaccgatacaaagagagaagtagttctcgacaccaagaagctctcgggtatgcgcatggagacggacgcagccgttttcaaccgcgggaaggtcttcctcaagggcaatcccatgcaaaccgtgaaggagcatgtgtgcccagattgccgcctcccaagactcatgtacccgaccaccggggctaattcttgcccccctcccgatcccaacgctgaatactgtacaaatgtgcctatgatcgacctgcctggtcatgatgtccatggcaaactctttgcagtcatgccgaacccaaagaaaaagaagggtgaccgagacagcaccatccctgaaattccaaccaccaagtgtcctatctgtccgcgctacttcgtcatgacccgtctcgcccaacaccttgaacgctgcgtttgtggtggccgcaccggccgcaaccagactcccacggacagtggagctagcaatggcaatagccccggttcatcagcacccaagcgcccttacggggacgacgatgaagaaagtcccagcccaacgaagaagaagaaactgaatggacccaagaagggctccaccacaaagcccggtcccagcaagctcaagcaatcattcacagtggaagacaacgacgatgacatcaagagcgaaaacgccgactaaactttcatttgtttttccataccctttttttcccctatcattatgtccgcggcgtttgagctttgttttgatgggctggttatgtcccatggcgtctctgggtctggtttggtctggtcatggtttgacctttccttcgaataaatctgcatagatgaatgatgacgaggggcacgggctttgtaggatgtacattacttgataacatgaaatacaactgacagaggcactgcaagcgatatgcaactgattgtgctaataccactatttttcttcgtttcttattaccttgaactcattggatgtccatgaggtatacagcttaacatgtacgctacaaagtggtctcacttcgaaatcatctgggcataatcaatctcgctaggtatatgaactaccacagcacatccatggatctatacatatatgccctaggtgccggtttaatctcagggcgctcagtgaacccactagtaatggctgatatccgagtctaaggggaaattatgcgctgatatcggatgtatggttagtctaagatacaggttgaagttgatttggtcctgattggaaactgtgtgcctctgtggttagcccccggggggccgggacaggccccgagaactggaggtgcttaataagtgcggggacgggcatttcatctttcaccaacgacgccgaaatattttcgaacatggctgatcttaacgcatgggcagctcctcgtctctcccagcttctcccgctggatccagattcactttctcaggtcatcgactatgccctcagcctctcgagggaggcatgtgccgaccatctcaaaaacctcctaggcgactccccggctgccctagaattcatctcctcgtttaattcacggcgagaaccccagcgaccacctcagaatccctctacacaaaacagagatgcatcgagatcaagtggaggagccaagaagggcaaaaagaaggctccgctgcacactgccggcccaccacgccgaccagacaactacggcaatgtaggtggcgcctacaagaaagccgatgaagaagactatatgtcttctcggaaaccaactactcccgctcttgcaccatcaccgcatgggtcctcggcctcgtcacgcattccctcccctttacctgcatcatccccgaagccaccaccgtccgcgagcggccctacgatctcagacatgctaccaaatgtgcgatcaaaagtgagcaagtcaacacgtcaaggtggaggagccggatcatcttccaagggaagcacagctcttacaaccaacgatatctctgacctcaccgcagctatcgccgccctagaggtatcgacaaatccgagtctgggggagagacgcaactgcacatgctatgggtcactacacccagtattcgatccagcgcccaattgtcttaactgcgggaaaattatttgctcactcgagggattacagccgtgctcattctgcggcacaccactcctctccgccgaagaagtgcagggcatgattcgggaactacgggcggagcggggacaagagaagatgcgcgtacacaatgaaggtgttcatcatgaagggggtcccagacctactcccgggtccgaaccttccaaactggatgccgcgaaagcacacagggacaagcttctccagttccaagcgcagaacgcccgccgaaccaaggttgtcgatgaaacagcggatttcgagaccccgaatgtcgcctcaaccttgtggatgacacccacccaacgagcgttggcgctcaagaagcagcagcgcattcagcgcgagatggatgagaaagctcgtcccgaatgggagaagaagaagactgtaatgagtcttgatattaaaggtggcaaggtccgccgagtctatcattccgcgccggcagaaccaactccagaggtcagcgagcccgagcctgttgatgaagtaggtgcggcggacatcccgcaaggacaacgcaatttcagtcgcaatccccttctcgcagcgggtggtcttatgcgacctgtttggcgtgcccctgagataaaacaggccgaggcagtgggacaaactgaacgaaaacagacttggcgacgtgtgcaagatgacaacgacgacaacgagcaatggattttggacggaggaatacatggacacaccagttagacataatcttacatggatttaaccgccagctccaaagcttgagcctccgaaaataccgtttcgggccatctcatgatcctgaatcgacctggaggcactttattcgggttatcatcgacttcatcgccgacaccggtgctgcaggacagcctcgcgcgacaaaatagcgtgtttacactatattgctgactgtgttgcattcctgaaaaagtggaatcctcggagcggatgtctctgattacccactgtacatcggctaataacggtgatactatcacaccaaggagaaaccgagccagtggagtcaatagaggggaacatctactggcaggggatcctactgtatgaccgaattagtgaatgacggcagcctgccaaaaatagagaatggtagattcatgttgcattcctatgtaacgacgatgtacccctacaatttttcaccacgggttatcaggttgaaatattcatttctttttgtctttagaccacaactccactggacccgaatccccacaaaagtaccagacatgaagcagacctttccccgcggataccataaagtcgatgcgtgggtatttaagcataaccaatcaccctgtacatatgtacagatcatccccaaacaaccgcctataaccgagtcagacataaacctatctacagtatggagtagaaattaaccacgcttgattggagttccagtcccaccaacaaaggccgacctgttttgtaggattttgtaggacggatccgtcgtcattgaccaggttcggttggggccgggtatcgacggtagctggagtataaaggaagttatgagacatttgataaagtagcgctttgaaaaggttattcctttatgatcatctcttaaaatgctcgttgaatctgtgctagagtgcctttctctacagagggttctgggaggcttggtagggctattagccgtagcggtacgcatatcctgtcctttcgatacattctgatgccctcccacttccaactatcacatcttagaagtaaaataatctaactcacttcagaccctcgcctacaccctctacaatcgattccttcacccgcttcatcatatcaacggccccttcctcgcatccatcacaccctgggtccagctctaccatggcctgaagggtgaccgccatctctggctacacaagctgcacagtcagtacgggacacacgtgcgcgttgcgcctaattttgtctctgtcaactctgaccgtggattgcacgatatctacgggcacgggaaacgccttcagaaggccaaattctacaatgctttccccgccatcaagggtgtgtataacacccacaatgctattgataaaactatgcatggtcgcaaaaggagagtacttagccaggctttctcggagaacgctctcaagggcatggaggatgtgatgctcctccatgtgcgccagctgtgtgccgtactagctggatatgatggggatttcgaatcgcatgatcagaagggcaatgtcaagaacatgggtgactggtttagttatctctcgtacgatgtcatgggcgagctctgcttcggaaagagctttgatatgcttatttctgagactcggagatataaagttggcttggtggatcgggctgcgaacaggcactatgtggtaagcacttctttttttaccatcattagggagcacgtttatctgattctgttacagtgcggactttggatgcctctggacacttggggtctggaccagatattcatccgcaagctgacgcgcgaccgatggaatttcattatgaactcgcgcgttgaagccaacgaacgcgccaaggagcgtactcagattggtcgggacgctaagaaggacttcttttattacctgttgaacgcgaaggacccggagaccggcaatggactcagcacgcctgaactttggggcgagtcaaatgtcctcatgattgcgggcagtgacacaacctcgactacactggcagccactctcttctacctagttcggagaccagaggcactggccaagctgtgtgccgaggtgtgcggcgccttcaatgaagtcgaagagatcgttaccagcagccagctcggcgaactagtgtatctcaaagcatgcatcgacgaggcgttgcgtctggccccagccgtacccggagcgattccccgcgaagtgatgcaaggtggcgctgtggtcgacggtgtcttcttacccgctggcacagactgcggcacaccgacatactccatccaccgccaagagcgatactaccgggaaccagggacctttatccccgaacggtggattgaggacgccacctgcatgggctctgggatgtcctggaagacgaccaaggagagcatcgagactgcgcgacacgcattttgtccatttagcatcggaccccgtggatgtattggcaagagtatggcttttatggagatgcggctgactctggcgcggctggtgttcctctttgacatgtcattggcggatcgtcagggcgaagacgcggggggccacctggcgctgacggaccatttcacttccgcgaagaatggaccgaatgtcgtgtttcggcggagataatttagttttatattaggcaattttatctaaaagcggtgcagaagatataaaataaaaagttgaaacatccaagtgtcgcttaatctctcagccttatccgccccctaccggctagcttctcaggacacggttgcgcaacttggcaagccttctcgactcttttgtcatttgtgtacatttgggcattggcattgatatttccatggatttgattgaaggaatatatccaatatgacctccccgttaattgtgacattcgtgcaagcgacggttctcaatgcccttgctaacgttttggcacaattgatcgatcaaaggcacagcaaagtaaggactttctatgctgcgtgctcaaacatgacagaattaacaaagtctcaggctccattcactttaaacacaccggcgctgctccagtttctgggctatggcctcttaattgtggcccccaatttctactggcaacgcgcccttgaagcgcgttatccagggtttcctacgcgcgccgaactctcaaatgcattcagtgttcgatcactgaaatctttgctctctccccgctcatggctctctctcttttcacggtctcaccaggaggacttgctccctagccacaaggacaaggagaaacatgtccgatgggcgccgcgagcgcagacatctgggctgcgtagcttcgtcatgaagttcttctttgatcagacggctgcctcgattgtaaatctcgtgctatttgtggttctcatcaacctgctgaagggagagactctggcgaaatcctgggatttggttcttttggtaagttgcttttctgttgaacaacagtgttgattacacagatgctgactcgtataggatttctggcctcttatgagtgcccgtctgaagtaccggcctgtcgtttcggtcttaatgtacacagtcattcctgtggatcgacgggtggtctttggaagcgcatgcggggtgatctggggggtgtatctgagtttatatgctggggtttaggtctgtcacttctgcttctgtgctacttcagcgttgtattatcaaagaaattgttacaataatatgtcaagcggtcttacccaagaccaaataaaatgaaacttggctcaacgccaaaagattagaaatgttttcactttgacaaaaatatatattaggtctatcgcaaaccactccactgcgaatctcgtatctgtataattttctagcgcttcttcaaggccgacgatataaactgccgtggacagttgatctatatcctcctgcgtcttctctactatacactatatactacacacttgaagtgtgctgtgcactttctaagcctcattcttcgagctaccccattgttaagacaatgcattttccacctcgcatctgtggcagagtcccagggcctgacgaacaccactccaaagaggcagtgggtccagtgacacgacttgagtttcttgtaaatccattgaagggactgatgtcgcgacatggccggggatactcactagcgttttcagctacgcctcaggttctcctcacttgggactcattctttctccgtcgtctctcagtctatcctcacttcaacgtcataagtcccgttctccgccgtccgcaccttcctctgataggtcatcgcctgaacctgccaccgatggttcgttgtgtcgttccttctccagtaccatgctgttgccacgagtgacgacccagttaagaagtaccttaagttgaccatttccttaacgtcgcacgtcggcagtacgattcactatactaactctccaggcccgagggtcaaccgagggaagccgacgtttgaatcttactacaatgtgtcgtggaatttacatgtcctctctagcgggtgtcctgctcggtccgaataacacctgcgatatgagctcgctaatgtcttttcattgagtgcaagaggcctgaccaagggaagagatgaggcaaacgtacctggagccaacaagtccaagacgccttcgccaagctggaaaaccaataactctggtctagacctctgagcaagatggagacaggcttctcttccagtcgagaaataaaatagcgatcattcaaaagatacattccatcacacaaagcaatgatattgattgggctttttattcgacattaatacacgcatgagttatcataaacagtagaaagttaataggcatatggcctaggacaatactccgtaaaccatcccacgaggacagaaacaaaaagatataacggtgtgaaaattaagaatgtgcacgaaaagacctcccagttcagactcgagcctcaaacaggggccacctcgaccttcttgcccttgacagacaaccactccacgaagatgggcccaacgagcgataatgcgcccatggcgacagcaacgtagaaagtctgcacaatagcagcattataggcaaccaggacactctgcagggcatcaccacttacaacagtgcggagcatagtagcgccaacagagacgatcttcgcagcgtcctcagtaggcgcatactgagccaagttgtggacaagctggttctggaacacattttgcccgacggagacgaaaatagcgccaccaagagtctgggagaacatgacgagagccgtgccactgggaatgtcttcgaccttcagagcagtctgagcgacgatcatgggttgctgcatgcccaagcccagaccgataccaaagagcgcctggtatccgatccacttggagtgatttgagtctgtctccagggtcgtcaggagacctgcgccgatggttattatgatggccgaggcgatcatgaagggtgtgtagtatccgcaagcggtgacgaggccaccagccaggatagagacaatcacaactgcaatgatcatgggcaggttcatgatgccggatttcaaggcggttgcacccttgattgactggaaccagatagggagctaaaacaagtgttagtgctttgattgggacgggtgggaaggaggaactaaagggaaagagtgctcacataaaatgtcaagacaaagaatgcagcgccaagagcaagggcataccaggccgagccccaaatgttacggttcttgataaggcgcggcgggacggttgcccggtctccggcccagatctgtacgccaatgaacacgagaccgaggacgccgaagaccacaaataggccgataatgcgtccactgccccacgcatacttggtaccaccccattgcagcgcaagcaacaagctgatgatagagggcaggaaaaagaaggagccaatcaggtccagctccttcatttgttccttaaaggtgttcttcttcaagatggctttcggtgtttggaagaagaacaacaagaagaagaaagtcactcctccaagaggcaggttaatgtaaaaacaccaacgccaagtgaggtggtcggtgaatgcgcctcccatactgccgtaagttagcataactcgccaatcaagaaacaggagcaacatacagaggaccggctacattggcaattccaaacatcgcgccaatgaggcccgtatagacaggtcgcttgaccaggggtacactcttgctgatgatgaggatagagcccgagaaaagaccagccgctccgagtccggcgatggctcggccgcagatgagtccgaccgaggtgggagtaacagcacagacgagcgagccgacctcgaaaataaagagcgcgatcaggtatatccacttgattgagtagaatgtgtagagtttgccaaatgtcagggacacggcacatgttgtcaggagatatgaacttccgtaccagccgacgtcttcgagtgagttgaattggtcagtgattttaggaattgctgttgcaatgatagtgttgtcctagtggattcggtgttagctggatgtgagcatccaaataaagccaactggtagtgcataccaatgccacgcagaacacgcatagacagagagcaatgctgatcagagtcaatctccatgcgtttgggtactcttcctcgtctttcggcgtttctgcgccatcgtcctcttttttctcttctggtgttggctgcttgtctaatggatcctgggtgaccagctccctgttggagtcgttgtggacgggcgttggagtatcacggcttgcaagctctttgtcggtgtcattattaggagtcgcatttctcgtcaaatgctcatcgactagagtgctctctttttcgctcgagggctttgaagtttgacccacagactcggaatggctgtcatcattgggtgtcacattattctgctcagtgttgtgctcagatttatctccaggtacatctgcgtccttgcgagatctgactttcaaggcatcgaggaagcccatgatgaacgaaaggggaaaaagccagcagtattaaaaaatcaaaagaagcccgtagtaagaattaacgaaagttggggcatatgaacaggaagaggaaattacagagatttaaaaggaaacgaagaaataagccaaggttgaccttgtaaacacaaccagttcgtacaggtctcatctgaaaccttgcctgtggatttcttgggaaggagaaaaggaccaatccaggttgcgcagaaccctgtgatcatatttcaggagtccatgtggtacatgagatcctccactgagctgcatatcctgcagtcttttgctttcgtaattaggcagcgaggtccagttcccaaggaaccacctagtcgattagttcaaacagttgacaaagcggttatgcaactatcattagtcgcactagtcccgaatatcataagccatcagaacaaacagcggatctgttcgcatctgacagggtctgagtcaaaatgtgctcttgaacacagacgaaatgtccgggcgaaatgtccagttcagtttggataggtggggctgcagtcaggagaatgcaaggaccagcgtgatcaattatttaattgttgcatgaactgatgtgcaagtctttggttgcagtcgttcgccaatcagcgatcagggggatgtgcatagtacatcgccccttgctcgagcatccgacagagagaaacattgttcctgcaacggattacgagtacaccgctgttgacaaaacagggggaaaaggataaatattggatctgaccgagtagtttgaaattgaggaaggggttaagggtttactccagatgaacaaagcgttctgtgcaattgcggagtttacaatgttgtgaatggctcaaatgatcgacagctcaagctgacatggctctaacgagatggggattagtgcggcttggaaccacggaagcaactcggagatcggggttaagcttgtctttgttcctacgttgtgctatacttcatcgttctctgatgattcttgatatggtcatacttgtttttataagagtataagtcaatcaatataggtcacaagatacttcgcccaattcgtaggggtgtttcaaaggtctattacatggcccgagtacagcatatacagggcctatcctagccgatctatactggcattgcactgctattatgactgctcgatgatatccatcagtttccatggggagggcagtgttacaggtacttatgcacaagaccacaactccacgtttgatgtagtaaaccgtacaatatagatatggggaacggagatataattgcgagtaagagttaattccgatcaccaaggttaatagatgcaatgggatgacgaaactagtctttccaatgttagcaccgaaatactaactccgtcagcgaagaaagaagcccaagtataaaaggcacatcaagcgaccagaatacttcattccaccaccatcagtcttcgtaacaagaacattacattactccaactatacaatggacgaaatcttcggagctgcgccagagcccgccacccctctgggccggtaccgggtcctctcctcaacagcaggagtccgcgtctccccccttcagctcggcgcaatgtccatcggcgacgcctggagccgattcatgggcagcatgagcaaagagcaatcctttgcactgctcgatgccttcgtcgccgctggcggaaacttcatcgacacagcaaacaactaccaggacgagcaatccgagacctggctcggtgaatggatggccgcacgcaacaaccgcgaccaattcgttctagccaccgagttcacatccgactaccgcagccacgcgctcggtaagggcaacactgttaacgcctgcgggaaccacaagcgcaacatgaccctcagcgtccgtgactctctccgcaaactccaaaccgacttcatcgacgtcctctacgtccactggtgggaccacaccacctctatcgaggaaatcatggactccctccacatcctcgtcgagcagggtaaggtcatgtacctcgggatctcggattctcccgcgtgggtcgtttctgcggcgaatacttatgcgcgcgcgcacggcaaaacgcctttctctatttaccagggccggtggaacgtgatgcgccgcgacttcgagcgcgatatcctacccatggcgcggcatttcgggatggcgcttgcgccgtgggatgtgcttggtggcggtcatttccagactgctaagcaggtcgaggaacggaagaagacgggtgagggtctgcgcagtacgatgggtgctgagcagacagaagaggagaggcgtatctccgaggcgttggccactgttgctgctgagcatgggattgagtcggtcactactattgcgttagcttatgtgctttgcaaggcgccgaatgtgttcccgcttgtaggaggccgcaagattgagcatctgcatgacaatatccaggctttgtcgattcggcttagtgataagcagattgagtttttggaggcggcgactacttttgatgttgggttccccaataacttcattgggattgatccgagtgtcaatggtggcaaggcgtccttcttgctgggctcgtctggccatatcgactttgttcaggcacctcgggctattgggtatgagcctagtaaataggggactttgagatgtcccagaagtatgtaatgccagtaggactagtgcaaatattgttttctttatccgccttttcgtacatctacttggagagattcattaagcaatggaattgtgaaataataaatagacaagaaatgaagatgacaatgggtttagaagccagttcaatgcaatgtaccgtcatcgcatgccgtcccacgccgggaaggcttcgaaggaagtctctgcgacttcaaatgaaaagtccagccttaatataatgtgacattgttataggaagtagactgaatggggtgcggtaattgtggatgtccgcatccgcaggtagcgaactctcgcgggtcggcaatttggccatcaagatctgaatcttggtttcagctgacagtgttgccatgggtttggatgagcaagaggagagaacttgaatagggtatttgttttcggggtaacagattgtggcaggtcggagatttgagtaacatcagggaggtcgaccaagccggctttcagattcgctggggggaagagagggggtcggccgctgtaaaggtcgtgaaaaacgaagagttccaaccaacaaaagacgtaatgaagggaaccatgggataatccgggtcatttagttctcgcggggaatttcaaagccctcggtcttgttagcgacgagcgcaatcagagctgcgccaacaccgctgccatccttggaaatgccaatacggatcctcttgtcgcctgcagctccaacttcgggaacttcgcgcaaagcctcacgcaaatgcccttcaaagttggggtagaattcaacgaggctgccatcgacaccaatgtcaatcatatcatcagtctgaagcttgttactgtgcacgacaatagcagccaacgggacagcgctcaggcgagcggcacgtttcccaatggcgtgaactatggttttcacagcctggcactcttcgaggctggggttctcaatctcgaggtgatccttcaatgcagtcttcacatccaccaagtcctcgctggtatcagcttcgactgaactcagcatgctggtgtcaagaccccattgacggaaaagcatggatccttcaggaaggacgaccttggagtccttgttggcctggaacagtcccaggtcggcacggtagagagacaggagcgcgcggcggagaatttcgcccaagaacatgcctgaaacacgtttttcgaacatctgcacaccggggttgttgctgtcggcatcgagctcatcgtcgaacacggtggtagggagaacgctcatgtggttgtcgaagctaccccactcagcgttgataatcatctcgcctgtggagtcttcaaagtgggcatccttcatatgctggagcttggtgatgttcttggtcttctccacgtaagcaccgttggtaccggttccgaaaatggcaccaatgaaagtgccagtctcgcctggcgaggtgtatgagcgggccatgagagtaccgacggtgtcgttcactaacgcagccacgcgcactggcaggctcaactcatcaatggcggactgaagcagcgcgcaaacatcgtgaccaaccgcatcggggatattgaagcccttggtccagcggataagtgttccgcggttgatcccacactggcgcacagggaaactgaaggtaaagcccagatcgaacaggtcctcttcggtgttaccctcccgtcggcggagcaggtgggcctcgaagtgttcgttgtggtgaatgcgaaggaatgcctcgatttgacgggccaagaacaggaagagatcctttgatgtgccagaggccatcaattcccgaggaattaagatcttggactgggtgagggagaaggtggtgtcgccgtgcaggaggaccgagcacacacggaagttagtgccaccgagatcaacagccaagtaaagaccctataccaaagagaatcagcgcgcaattcccgttggaaaattagtctgccgtcataccttttctgtgccatttggcaccgcagtcacgaaagtagggatttggctcaaggtggtgccctctttggtcaagccctcgttagactgcttgatgtactcggcaaccccgcgctgcactttctcggcggggtagtcgaagtcacgcgcaatgcgcgtagcttggtccaatagtgaagaagacatggtgggacaagaaatgggatagccgggttaggtagagagttgagataccggctaatgggagaaaggaagggaaaagagtagggaaagaagaaagtaagaagaaaagcgggagaagaaataagacacgaaacacagaacctcacctgggcaaaaaaggtgggatgacgggggtatccatgaggtcagtcctcagtccggtaccttggcagtacatttcccgccgtaataacagccactggtaatgaagtatctacaatgtactgttagggtatttggggaattgccgggttcaccggagagaaatgttactttattcttttatatcttatagttattgtacgctttcaattcagttctttgaatagagaaatcaacaaacatccgatgttgttttgagtattctaccgatcacatcgatgaccgaaagcagcctcaacattcctggggcattcgttttcttttttctttctttttttctttcttttttccccatgacgccatgagtagaaacatttaattttggcagactttgacaatgtggggagacattattactggtcaatcgtttcaacctgcatatttcccccgaacttcaccggtgagcgacacaggttaagactagactggggcaggggacgggaatatacaaatcccacatcgggggataaccctggtatttcacggagtatcccaaaatgtgtatgcctgcatatgctgatttgggggatttgaaaaaaattgacatttatgtcgcgcttatatgcagatgtacaaccgatgtatgtgcacactgtacatcatagagatcgggatagatcggccccatcccggtgtactcggccccagagccaaatggtcaacccgaatgcacggaatcccgagtgtggatgtctgaaaccccatggagatgatgagacatgtggcttttctcttattaataaatttgtcctccgtactccgtggttccatggttattcttcttttcttcccaaccggaacaggttctacgtaagattcgcctgtctttcaaccatcgaaattcctaatcgtcacaacccgattccattctaattcccactatatgtataaagaagttcaattggtttataaccaaaacagaatactatgatgtgcattcgaatgtagccttagaggtctggcatcttgcactgattcgatttagtactattcatcgagtatgaattagggctacaaagctttttgattgatagaatctaacacataacccaagccttaggggccatggtcataccttgtttgtctggagattagttatacacacgctagtagtcaatcttattctttgtttatacggcaaattgtcttacacagtgctttttcttttcatgtacagaaaaacttgccttttcctactaggagcatcagagtatatcgcctatatgtatgtatcgatggactctgcagataccaagtacacagcgtttggttaccatcatatagccttgaggtgtggggatcgtggctggtataacatgttagccacgccaacctcatttaagcaatacctgaggacatttgctacatgtagttaagcattgaagaattgactaatcccagaccaggacctcaggactctttcatcccaggtattgctctttggttccgtcatatatctcttttgcaatacgtcatgttgtttggaaacctgcattgggcatttgaagtcgttgacgccgagtccttcattgtcggtggattggcctactgctgttaacgcaagccgtgatattacttggataccatacccatttacatcatatatcatatatagttgaccgtagttgactgccaggatgcatattgagactagccggcaactggcggccacactgcggcaggccgaggatgactaaccaaatttcacgtgacttccaacatcctccgaactgaacgggtgtgagcgggcatctcgaaccatcactgtctttttatcttaacaggactcgtccttttttgtccaagaatgggtgctggaaactctaagcctgaggcttcggctggctcacaacatgtgttctccaggtatttgctctccgacctcaatttcagcttccgcggcatttcgtgcttgatggtggagagaacgggaactaccttccaattggcgccaattgcggaagggcaaatggttcccgcagatataaaagagctctcaatatcccctcagcatttgcgacagccaggagctcctctaaagcatcctacagcccacgctaaccatgcatgcacagcaactcgcccgtccaattctcctcaaacctagtcgatgcactccaatcgaactcagaggtgagcacaacgaggctataagcaaatctccatttcaatgcaaaaatctcacaatccaccaatcaaacagtccgactccacccgcgccaaagccctggaattggagatccagaaccgcgtcgcgcaggaactgcaacgcctccgcgaacgcgagcagcaaaccctcgccgagatcgagaagcgcatctccgagtccaaagacaccacctctctgcccgtcacagcagcgaccgcgcccctcgccccctccacctcgggctacccagccggctcattgaacctggacgcaccgcggatccccttcgccggccgccatcacgaccccgttcctacagtcgccgcgccgcaggagcccgctgccgctgcacagcctgtcgttaagcgcgatgtctcgcgcgactctgtagcggccgagatcgagcagctccggagcaagcttgatggacggaggaagcttgtggagctcgatgatggtgttgctaaggctcgttccgatgttactagctgtctgcaattgaatgaccgccggccgttgaactgctgggaggaggttgatgctttcaagcgtgaggttgcgcgtatggaggctgctttcgtggatcgcattgtgggttagatttgtggggtcgggaatacagcggcttgatatgaagtctctacgttttatgggacctgattctgggctaagagctgctgtactgtatgtatagaacgggcatttttctttgttccatttgttttcatccgaataggatagagttaatccatggatgagagtggatctttgtcgtttaacccttgggagggctattcttttgctagtagaaaatatactaagtctcaggccgactggggcagagaccgtgtttaaacgacaattgggcatctccactgctgggcaaggttcatcgaatttgatatcatacgaattcccatacccctaaacgcccgctcttctcccctgcggcccggataatacacattcttctctcagagagcttgataccgggagccaatacctttgaaagctggatagacccaatgcctgtccctttgccttcggaaagattataatttcctgtagtgacgaaaccaatcagatcgtcttcggttggtacttccaatggctcagagtcaggttctccatcagtagttgagatgagagccttggcaaggaggcgccgagcctcttcagattcgggcgcagcgtttcctgccttagagagcttcggttgtccaggcttcttggtccttgccgagccaagatcaagccatttctggcgtagagctggatctgtaggaagccggtagatccgcgcacggggggtgggtgtgcctcgtgtggtgagagtaagatagacagtggcaagtgtggagacatcgacggatgctgtgtcgagcttactcaagctttggtaggtatcagccggaggaagacgaacgttgtgaatatcgaggggtgggatgatgggagtagaggggtcgtttttgtcagtctctttggaggcagttggctttttgaccgagctgccatcggcagttcctgtcgtagcatcgtcctgtttcggcccttgaaggagcctttcccagtcacacgcccacccatggcctatctcgccttttggacgaccatcgcccaatgaaatgttatcaaactcgggacgccgccccttaggacgtcgctcccaatcacgtcgtgatgtctcggtctcacgctgaccccattcccagccagcccgtgttcctgggaaatctccagggaaccacgcctcgcctgcttcgaaagcaagctgccgctgctgcttcaacccgccaagcaatgggtttcctccgctggatagtgggtagaacatgattgaataccagaccgggacaacacatttccatggtagtaatacggtccaggaccctggggcattgctgcgtttggcccgggcttgtggcttgttcgcgagtatcatgatcggaatttgagggtctgatggttgggatggcggatattcacccggaccggcaagagtgcggcgccggttgatagccttctggctcgggagctgacgagccgctgttaaccgagtggttcggtcgaacagcttagagggaccttgtgttttgtccgggtgccatgtggaaagtaacatagctaggttattcatgtgggattcgttgtcggagacgtgaagtgttcgtggtgggaaatgcaggcgaggatctgaaatagcaaaagagagcagggcattatgcggtagtgaggacggattcgacacccccaaaagagatggccagatggcttccgggctctgtggtgatgaagcattaccatctggcccaataatcggtttcaatgccgacaacaaggcctcagttgaccctggccctgtgatctcaatactgccaatttcgaatcgtaggtcctcgaccatgacaggggggttttgtgatttcgataccgcaaggacatccgtccacagctggaggaacgccgaaggatgaaccctaatccaaagttttcggtgatctttcttagatgacttgggctgaggttcgtcggcatcaaccatctcaacatcttcctgtttggcacaccatatcaatgttaccggtgcagttggacgtttcgtatagtccttttcaaaagtccaggcctgtagagaccgagtcccggctctccatttcttccccttgctgccccatacattgtcccccttgacacctactgccatcaggacagcctggatagctggttccgctccttctaactgtatagtagacatatagctcatatcccacgccacggcaccccgggcgcctcgagcacggtgagtaggccgatagcttttctcggtgggggataagggaacagcgaaacgccaaatcggatcctttgtcgtcgccatatgagctcgctttgcatgatacagatgagtaggtagccatgtcttgcatctctggcgcttgcggtacttaggctctgcgggaagaggtctcgacagcttgtttttcttgatcttgggaacccgtggcgcaatatcgaaggcatgacttccttccttttccaatgaagtttggttcgcttggtctcgccttagttttgcggccgaccgtcgggcctttgttttcgagtttatagcctgtagccgccgagcggtatcgagtcgaatgcgcatcattcgggatggcttgcgtctgcgcgccgtcacagtaggtgtgttatcctcggccatctaacatggttgagacagcgggttagtcaatggccatttggcaattcgtacatcattgtcaataaatacctctcgcttagctcgagccctcaatctccgcgggactcgcttcacattatgactcgccgtccgccgccgcagggagcggggaactttttggaaggctcgggtcgtgagcgcatttttcgagcgctgcatcccctcctccagagcctggatctcaaatgcccgagctgcagagtaggcggcgacatcgagctcgcccgtggcggagagagcggcgtcggccgactgcacagccaaggtgcgcgcatcaaatgttttggcgcgtttacgagatgccccggctgcgccacgtggacctgagggagcgtaaggtttccgcttggcggaagggtgggatgtcatggctgctgattgaagttgcgtgtatggacgttcgcgagtaaaaaaagttgccgggcttggcgcgtcatgatcggctcatgttgatcttatctacggctcttttactacatattatcttcgttcttgaatatgttgtatgtatcttcccatcacatttagagacattgttctcatgattaagatatatcctgcgagtgagaatatttcgcataaatcgcaattgggatatgccctcacatgaccacggcaacatggtctgtcatatacttctggatatcgcccaagaaacaggcggccacaatggagacgccaccgaatgcaatgctgacatagtatacccatttatacccctcagcatatgcaatctgaccagcccttactaccatttgatatgcagtctcattaccagcgataccagggattgtgcgcagctcgcccagcaacgactcacctgtcaattcaattgcttcaccaatcagtttgacgtcggtgatgttgagttctttcatcatcacaccaccgatgtaatgtgttgccgctgggacaaacttcgagatgaagacattgtagtaaatggtgtagccgataccaccgcctaccacgcgaatagagagggtgagcgcagaaatagtggcaattaaatcctagcgaaagccaacgtcagtaggcaaattccctcccataaagcaagacaactcacgtccgggcaaatgattgtggtaataatcgaggctggcaccacaatccctccaattccaaggccagcaaggatgagaattccccagagctgatacatattatcggtgcggccgatagccatagcaccgcatcctgttatgagaaaaacaatttagcctttggggactcctatagccacagacaaaactcacctgcagtcatcagcacactactaatgatcaagagctccttgttgtgtccacgaagcacacttagcagcgcaagcacaatacaagctcctgccataatcccaaatccaatagggatactgcgaacacccacatccactgggtcatgaccgtagacattgaacgattccgtgggccagaacataagcacggagaagaagttggcaccagagatgaaagtaatcacgagggtaagtcctagaattcgaggctcttgcttgaggcgagatggaaaaatggggtatttagctccgtaaatttcccagaaagcaaaaccaacaagcagaaggaacccgacgatcaatggtgccaggacatgggcagatgtccatggatactaaatcatatcagtaagatatagcgccggacgaaatgtattcaagcataccatatatccaccccattgcaagccggccaaaaagacaatgagaccggcgatgctgagaaatccaccaacaaagtcgactcgtccaattatctccttccggctcaaaccagctgagttgactcgtggcggagggaagtagaacaaaatcgtgatcaatagaccaaaggcactccatgcagcacagaacgcaccgacatagcgccaatggctgtgatacgcgataagctgagcccatagcacggacgggcaaaatggtaggatggtgaagataaggattgacacatagactcctctctttcgagtcggcgccatctcggaagttgcagccagtgctgtcagttcattgaccccggcaccggcaccagcgatggccattcccgctgtatccatgtcagtgaatgtctatatgctttgatatccgggcaatacaaaccgatgaagttgttcattgtgtgcactgtgctgcatatgatcattccaataactatcagagatgctccaataatagcgactgggcggcgtccgagtagatctgatagagacccaacaaaagggcatacaccggcaaggccgagcaaattggcaagaacctaagcagaaactcgttagtcgataacctatacttcagtgagtatgtactcacaaaccagacccatcggtctgctccaccaatgtctccataaatgtagggagggataccgcctaatgagaaggcatcaaaatcatatcatagctttcgtgttgtttttgacgtaccaaagaggtataccgggatctgactcccagtccacaagaaagccatggcagtaaatcccatgaagcggcggaaggtcatctttccaatggtcagtactgtcgtaaccgcaaattgaacaaccgaatcctaccgggatatccttctcagactcatgcataccttcctccgagcccggtctggtcatttcctggtgaccatgctgtgcagtgtcaatgtgttcgtgatgttgcatcacagccttctcctcgaccggctgactcgattgaattgattccgccattgggagcatgagtcagggcagcacaattgtgggcaagcaaaggggggattgtctctggccctaacacaaacaaaattggatgtaattcgaattcgactgaaatgtggacgatattgaaaattaaatctggagcctcgaaaaaaggatacgaggatataaattcacttgagctcaaaccagttggcgtatgtcatggaagtgtcctcggggatgtaatgaatcagagtggggaagtaaaaaacaagctaatgagcgttgaataatagccgggacagtaatgcttgaaatccagaaaataccgaggcagcttggcaattccctcatacataacggtgatcttggacaaagacgctagggaaatgcgggggaggaaacgtggaggtggaggcagttggtccaggagtctacggggcactccggaggccgatgccagaatggggatcagccccgaaatccgaaaaaggaacaagaacgagacaccgggaaaatttgagtatagaattgatatcgttggatgtacaagagacattgtatctgtaagaagtcatcagatagcgcatatctgtacagaaatagttcatataagaggcctggtttccctttgctagcttcctgcttttccgttgactccttccaaggggaccaggaggccggagttgagtctattacaacctcggccgaagctgagaagaagccacacgatcgataacagccgcgtattcctagacttcaagccgtccagcagtaaagtgtgtatatttctgcagctcagaaatattccccaaccttgctcagcttgagtgtcttggggacaacaaaaagtcctgttgcttcaacacataatcggcctgccatatcacggacctcacacttggcgtatgccttggtatccgtgctccgttcctgatctagggttgtatgcagggtatagaaattgtccgagtggaccggcgctcggtagttgagctcgaggttggcagtgacacctgtgcgtgctgggaaatgccgaatggctgcgcgccccaggttctcatcgatcacagtgcccagcgcgccaccgtggaccatggttggccagccttcgaggcctggtcccaagaagaccacgctaatgagtttcttctctttgtcattccagaaaactttctgtcaaatatgagaatagttagacaaagcgggatcccgaggttcggcagtcaaaaggtccggcatccatgtaagatggacatgcctcggaccctaatgagaaaacgagagaccaacctgtaatcccaagcccctactgccagccaagggccctgatgtcagccgatgagttttgtgctcatccgagaagttttcgtagacatccttttcgacgtaatcggggttacgacgcagctcctgcacaatggggagtccaatatcaaacacccgctggatttcccgaatctccatttgatcttccaacgacccaggaaccgctggcgctgcaattttgttgtccagccatttccctgcaccaacgccaagcgttccaaatatgccaccatagatcagacggcgcgtccaacgcgatggttctcgtgaggcatttggttgtgccgcggtgctgacgtttcggaccgctggtcgccaaaaagttcgtgtctgtcctgagtaccggcgaagggccaactggaggatattgcggtaatgtatcatggtggtcacattgccattcctctagaattaggatgttgatttaattggagctttggacaattcgggccgaggctcaatcaggtcacgtgcactttccattagtcatatatcgccaggtgcgaggtctccaggcaggaagaaatctaaacacagacggggactacaaatgtatttgcaaggtaaaagacgatcaattggtaacagttaagggcatttgagacgagcatcattcatgttcatcgtttctatccatctagaggcaacatttgcagattcctttcaaatgtgaacggatgcttaggcaaacccgtttactcgggcttgggcagctcaatcgcacggtagaggcaaataagcgcggagtgtgattcccctagatatgtcgttagaaatgatcttggatcgtaggatgcggttcacttaccaccacccgaaagggtctcgatcttctgtgcctcgacctcagtaactgtatcatcattgaaccaccaccacttgtcgtccgtttcgcggcgcttgttgcctgtctgaggatcaccccgctcctgtttcttgacatatgccgtgtagtgaccgctgtcggcgctcgcaccctggtgggtgatcacggcacggagctcatacaggcctgactgattggtaccgctgtctccggcaccccgttggttgacgagctcttggagctctctcttcgcaatgcggatagattcggctttttctgcttcgtactcagcatcagttttgaaagtttcctccatctggctatcgccatccttgtcgttgaccttggacttgttctcctcggcagccttctttttctgcattggctccatgctttcgcccaggttggtctcttttgcctgtcgttctgcacgctcttcggcaactcgttggcgtttctgagaacgttcaacttccagttcctccttgcggatttcgcgaaccttgtcacgaatagggatgagctgctttcggaggtcatcggtgcaaaactccacaacgtccaattcggcagggaatgtcactttgcgcataatcttagccttcttctgggtctcgcgcttccagtaaaatcggacaaagtgaactgtgaggtacttgggcagtcgtgcgatacgagaacgctttttgtacacggagttgcgctccaagagaggagagtttttctcgatctgctcttcgaggccggccaaaattccatcctgcaggtggttcgtttcttttccgatatgacaatcaagtttatagaaaacatcagaagtttgactgggttgctcgccgagttccttagcggcgggatcctcacactcggtgacagattcgaattgccccgcgagatatttatccacgaatgaggtcgtagtggcagactctccctcgccctcagtgatggtcaacttagtccgcaattggttcaagatctgggagaaagcctcctcggcatcctgttgggagtatccttgtccatttcggtcacgttgggcgaattgagggaaaacggctcggagagcattgaggaacatcagtggaggaatgccctcctgtgtctcggacatttgcttgaacagatctcgcaaagaagccgccaaatcccgagaacctccaaggccaccaataccaaagctgctgaggtctgacagactcgattgtccagcccccccacttggtcgataccgcatgagctcttcctgaagctccgggacactccgcaaagtttgtagggaagagttgaggtagcatgtgttccccaagttctgcaaaccggcaggggtagcaccctcctgccgtgccacctcagcctcagtcatgtcttcaaggaatttgacggcctcctttggccgaccaaggtcagcagaaccttgacctcccgatggggtgcccatcatcatgaacatctgcccgggtttggcattgagggacgaaagaggtgtatcatctttaagctggccacctttgaccaaaaccttttggcggtcaggttccacgccagtcaaggaaaagagctggtacttgagtgtttcaccgttggaggtagggtcgagctcgacttcgtggcgcttgccggcgtgtttgacaataactgtgtatctgttagtaatggtgcagggactgccaatacgtgcatacatactcggtatagctgccattttcaataaattgtagggatggaagatgtgaaaaagataaacagcttgaaagagcttgcgattgctggggcaaatggtaaacagcctgggatcaggaagcgtgggggctttctcaccgcccaaccactatcatcaccgcccgccccgacgtcaactcctcttctgcctagaacaacctgttatccagagaagtgcctttctcgttcactgctgtgggttgaagggtctcaccacggactagtttcaattgtttctcaaccagctccctgctgtcttatcctctgcgacaaattacatcctcgtggcctcgacacacgcccctcaccatggtgggtacagctccaatcagtcagcccgttctatactaatcgattatcagagtcaatccctccggccctaccttcaggcgtgtgtttcgacctttgacaagtattcagcggcaagcttgctcacacttactttactagtgttcggtcctctttgaccgcggctcttacaatctccaacttcgcttctcagacatcggagcggcagtaagttgacatgctgcaaatgttagacaggaaatatgctaatatactcacttgcaccagcaactgcccagaggttgaggcaaattcttcgcccgagatcctactgaacccgtacgtctgactctcatttttccccaaggtccgttggtcatgtgtattgatggctttccaggctgcacatcagcaggaatgaaaatgaaaaggtgaaaattgagccaagctacaattctgtgcgcataagtatcagaatcaagcaggcagatgagatcgagcacattcttgtccacaaatttactcggttcctcacccagcgagcggaatccttcttcattttgcgccggaagccagtagagggatatgacatcagtttcctcatcacgaacttccacacggaaaagatgcttactcacaagctaattgattttgtgatcgaattcatggaagaggtggacaaggagatttcggagatgaagctcttcgtatgtgtatgaatgcatcgtttccgtcgcaagttactaaacagttcactagttgaatgcccgtgctcgatttgttgccgagtctttcctgacaccggtatgttatatattgaattgtccaccattgactcacttgctgactattgtttagttcgattaaattgcccagcgttttcttgttgatcccgaataatgaatggtcctgtgtttcccactttctactcctgtacagataacataggcttgcattgattaagagagaaccttataccgatgtccgtcgatagattcttttgtccagatttagttcgctactttctgcagcaaagtaaacccatccaccagcgtagtgcctcgccgagtatgctagcctactgttgacctggtactccccatcaagatgggaattgtctccatagcaataaataataaatgaaggagaagaaagtacgttagagacaacgttcttaacaacagtgacataatacatatctctccaagacaagttccatggctcagagcaatctaacagggccaagagatatcattgaggggatgcatcttatgctaataacaggctattatgtaggtccaagtctatttacaatgacaataattcgtaatttaaggataaagtgaagaatgccacaaacaaggacaggaggacgattagatacctgtggactattggacatgggaagagtgcgtggagaataaatattgtctgggtaggatgcgtggagaaaagcaggtatagggtgtactagtgcgtggtaaataaatgcttaacttaaagctggacgaaatggaaatactttcgagaagggtgtggaattttggttaatgcggaataggtgagtggcaatagtaaattgccgcggaggtaagtgcgtcgtggtaaatacgtaccttgacagcgtcctgatagcctcgaggattaatatttttctaaatatcaccacaatgacagtgttgaagaaaacgacatatatactactctagctcattatttctaatttgaaaatattaaaaaaatagcataccgtataaatttatcgagaaaattgaggtcaaaatccagggttttatagggtgcctggcgtcactgaggtaccttcttaccccgacgacccgtacctgcgcgacataaccttaaacccacgcgtataaatagcttttccttacccacacgcacttagactcgaaaatatttttgtttccacgcactatctgtttcatctgatatcggttctcagccctaaaatgaggaacaacacgtctgagcacatgcccaaaacgggtgactggcctgctactatgagtgtcctgaccgcggaccttgatttattgactctcaatgaagatactcaacaaaactcacagactgccaccactactgtctgcgacacggacactcaggcgcctgcatctgcacctgctcttaagaaatctgactccgattctgatttgagcacgcaggcccctgctcgatttgttgcccaggttcctccagaactgattcctcctcagattcctcctcaagtctctgctcaggtttctgctcaggtttctcagtctcccacttcttccatttcttcaaccccatcctcattcattcattcccaccatcaaagttcattttccacttccaccatacgtccttctgcgaatcaacatcttaagttagcgtctggatacaatcctggagctattgaatttgtgccccaggcctatcgttcacctggccttcaatcccaattcgatcagtctccccttgagaccatacctcaagtccacgatcctgtggactttgctgaccagttccaacacagtaagtatcttttggctgtaccaccaccatcaaaactgtttgaatttcgctgatagcaatctcactacagcaaacgtcttcgaccgtaacaaatcttcaccgaacgccaccaacatgggctggccatttgaaacgggtgtgatctccaattatggggagttcgagcgttttgagaacttctcaatcgaggaactgcttcagcaatcgtgcatcccgtatggtagcatcgctgagatgcagccaccttctcgtaatggcgttctaatgatttctaacgtgagttacttttcaccatattctgtgtgcgctgatacttcgttcaatattttgttactaacagtagttacaatacccagatcccgtacaccgtgactcgtcaggaggttgcctcgttccttggacgcggtgctaacctgctcccatcctctcaaggatgtcccattcacatcatcatggaacggtccactggcaagaccatggactgctatgttgaatttccaacacagaaagatgctgaggataccgttaacagagtcagccgtgcctatgatgctggcagcgccccacgtatgggcagccgccatgttgacatagaactcagcaccccggccaagctactcaaggctgtctttccccgggcgaagtgcatttcgtgggagggtggaaagcctgtccagcttgtcaacaaagacagttggtctaccggttttgatggctttctcactgacgaagagctcttctgtctaactcgtcatgctgaacaacctcaccgggtacgtctaacttcgcttttatattctccatttttcatgtcgctgatattctgatatattacagagtgcatttgcttgcaaggttccacaacgctgttatgagtcgttcattaccacactctggaaggtaagtcgttcattgtctatacatctccgtttgcccttccacgttatactgacactctttgtcctctgctatagttcccgtggtacgcgaccgacctttacactgttcatcaccggaatgctcttttccatactctcaatgctctgatcaaggctctggtagagcgcatgcagagaggaaacacggtgggattggatattcgccttctcaacgagttggttcatgcaggcatctgttgcccggctttcaacccacgcatgaaatactgtttcgcttggcattcaaaggagcagagagcaattgtgtcattggaccatgactggtgcttgtatttcccatttgatactctcacctacatccctgggcaccgtactgctgcctttcaggtatgagatatgattgagactttgtcttcttctgaaagattgctaactcattctccaatcggtatagtactatgcctacgtcatgtcccacggttcggttctgcgcaccgagaatgacggtttgcggaacaagcatacacaccctgagatcctgcgaatcttcggaaggtcctggtttgagtgggacgaagacgttgcccgtaagaaggtcttcaaagatgcgattatctatgaagccagtgtccttcggaagttcattatcactggctttcagcaaattcacagaaggaaatccagcgtctcgaccattggcactgctcctggttcgtctccaacccacagtgttgcctcagttgatagccagcgcaccatttcacaatcccacactggctctatgaataccagccctgctcctcagggaacctcaactgtttcaactgccagcaacattactagcggtcccagtaaccatgatgctaaccgaaatgtccccggtaatccccgtcgtctttctcggcaacttgatgctgaccaacacctgctggacaccccaactcaccgtcctcgcgcatcggttcctccttacgttccgccgcaccaacggtctgatacagccaaggcccgtaagccatcggttacctggcgcatgcctcagacccaggaggcacctgcggttggctcagctcagggccagactgacttccagcctgtgtaccgtgctcctcatgccaccgctcagaacattcggtcgtcctctgatccttttggacctggcccttcgattgctcccagtagccatcgctctcgctccgacgccgcccgcctgtcgaacatcgaccgccaggtgtatgatgagctccgagctgctggtcgcggtacccgatctgcaaagaagtagtcgggcgtggtggaagatggaccagcactcctcccgtgggagtgctggtccatcagaccggtaactgtcttgctgttttctctggttctttgtttcttggtcttttcccttcccggtttttcctgcgtggatgtatggagacatccaccaggtttactcagaaaacccttgtctccgctgtttcctgttcttttgtcttgagttttctttttttttacttccagggaggccgaccatccatggctgctgccttcgggatatgcttggccagtttgcgagatctccctgtgactggaactcatctgagtttcatttttttctagctctgatgtcacttcttacttagttgactagctagatttcgtttgcgttgaactcttgcgtttgcttttacttcttgcgttcttgttatttttgctttgggcagggtttctttaagcgggcgttgttttgcctgtttgtagactatgtaggctatgcggcaacatgcatatagtaggacgccaatgtaagactgatcaggattaggtggcagctcactaaggccatgttggccagggcaatctcacagcgtcacctctttgtttcccaggtgaggaagtaggccaatactttcaatgttactaacctcctacttgctgtctgccttgatcacatcggtgtcttttttcagttatttgctctgatttaccttctatctcttgatcttagaattatgggtccaccagacatacttgtgtctgaccacgcagcaaggtcggtcctaacgaagcatctaccagcacttgccggcggatccaaaaacatacgttcgtgaccaagttgtgggaacgcagaccgcatctgctaccaactaagctctcattgtcgacagccaaccatctgcccttggtagagaccatcgaacgcaagctataatacggttgaagagacagagtgagcatgactgccactcagccaagcgcattggtcggtaccagatgagtcgattgggaggttatattggattaacgatcataacgagacgcagctaacgcttcacgttgcagattaacagcctccgtcaaggtgacgatgagatccactgatatgctcatggtaggagcgtgtcagatcgaacgcatgatcctcatctatttcgggcaccttacgaccgctatataccatgcaaggacgcctattccgattatgctgaccgtatttatgggttcaggactgggagaaaggcacaagagacattcaagcgtcccagatatcagacaggatgagacctcatacaagtggttcgggggtcctcagtcaagtcaatgaccctctgcgacccttcataaagtcggctctatgtcgagctgagctactcatactagtggtcagcacaaagcgaccaccgatatacatgtctcatccctgatcgattcgttcagctataggtcgagatcgggacattgaatgtaggtcgttgtttggacagacagctgttttcaacttggcattctttacaatacatatgtactttttaatcattattttgttctcaaaatacgaaagatacatacgtacatctggagggggggaaacgggaaaaaaacaaaaccgtaagggagtactaaaagcggagccgtatattacaggcggttttaaaggcatgcgggcccttttggttttattcgatttatcacttttgtcttcatctacagtatttttggcttcttttctgcttttcttgatttccaagttgccaaatacaaaaatcggaaatttttgactcaacatatagaaaaagaaggggtagaaagactctgtcaagttcaatcgttctcattcaattcatctgtctaagtatgcctcgacggtcgtctcagcctgatcctgcgtcgcctgaagcgcctatggcgtcaaagcgacgcgcttcagccagactgtccgccgccggaccgggggtcaaacgggtcaagtcaaacgccgacctgtccctccgccaggcaaagtctacgaccagcaagagcaaatacttcgagccggaagactcccatgagcccgactctgagtccgacggctctgcgggggggtcctctggctctttgtatgaggaagcaaaggaggaatcccccgccgaggatgcggagccggaagaactttccgaccccgaggaggatgcgaggaaaaagcccaccgcgagggggaagcaacgacacagcaccggcggcggaaacgaccttataaagggtcaggagctctggcgcgagggtgttagagcgggcctagagcccgggcaagaagttatcatcgcaaagcccaaggctcgagaggcggggaagattccctaccaggatgagacgctgcatcccaataccaggctgtttttgatcgatctagctaccaacaatgaccgccagtggctaaaaggtgagaagcgcacatacaccccagttatcgagttgctggctgacttgcgcagcgcatgatccggattaccgagcggcaaagaaggattttgagacattcgttgattccctcacgccgaagattgcagagatagatgctaccatcccggaacttcctgtgaaggacttggtaggcttgcggttactcctgtattttgtttgtgactcgcgctcataaccatttgtcccaggtattccgcatccatagggatgttcgcttcagcaagaatccacttccatacaaggtaggctatcttcctccccgagtcttgtcgatgtccctgtcgcacgtatacgtatgtggcgggtatgcgtatggtactatgggctgtcagcggtgcttttgctaatccaaaatgtacagacgcatttctctgctgcctggtaagtgttgatattcaatgactttttttaggagagacaagtcacctaacatcggtgaaggtctcggactggtaagaagggcccgtatgcagcatactatgtccacttccagccaggctcttgtttcgttggtaggttgttccccggctggttcccactgttgtcgtcgctatcctgcctttgctttcgtgattctcatccattgcggctaataccacgctgtgtataggctgcgggttgtggaatccggagtcagagccacttgcactgctgcgggaggacatcgacgagaactcggctggcttgaaggaggtactccgggcgccggagatgcgacgtgagtttctgaagggagtttccgacgatgacgatgcggttgtggatgcttttacgcatcacaataaggagtctgctctcaagacgaagcccaaggtatggaaatttttctgttttctattccccctaaccccaatgtgaagtatgttgcccattgagccagactttactccccatcatcaccttgtgctttggttgcattgtcagctgtttgtttattatttatgggctgggacgcgaaggtcttcaagacaggggacacaaggttcgctaccgaggttgtgtccatcgtccgaccgggattgattggtcttggaaacggaatttactcccatcctcatcgaccagtaccatcatcagggcttgacggcaatggtctgatgagatcatggagaccaaatcttttggttgaccaagagatgccttggtcggactggtaggcgcgaccacgggttctcacccagatccgaaggaaaactggcacatgacggcttgagagaatccaagagatccgagtatcccaaatgcttgtcaaaacatcgaaagagatgtggaagacacgcgcacggggttacgggaaagaccaacccgtgttttaggccaattttcgctcccgggacgcaaccatggaaccatggaacccaggaaagcaatttggcagtctggtctcaatgggggaatcgcacttgctagaatgggatttattcccacgccgtcgagtttggttccatggttcacacttgcgccaggatccacgtctgatccaagggattccaaggtttcttgaccgctgacacaccttctagggttacgaggcagacaacaagaacatcaaattacttcggctacgcagtttcactattggaaagcccattgcggacgatgaactcactggagacgatgcacaagagaagatttctgctttggttagggtcatggagcctttcgtaagcctttgtccaatctatcgattcccgatttccctttcccgccggttttgcccccctcttgactagtctgttttccattctgagctagccactttggcggtgttagccgtcccttttttacccacccaaatcagcgctggtgttactattattgttttttcccccttccccctttgacggaattggaaggggtgttcagacaataacctttatgctgtatactttgtattgctgaccgctgaccgcttctcgtttctcgagcaggtgacgtatctcaatagtgtggtgatgcccgatcaatgacatgattggggaaaatcacccgcgcctaattggcattggacgggacctcgggaagggggagaggtcaatctgttctattttaccttccctttgacttctgggcatgcttgtgtggtaagaggattgtggaatgaagttgttcgtatttgttacctgtcgaatttctccattttatttttcccattcaacatctgccttagctcgggtcttttgtctcgcaactccccgacttgaaaccgggatctcatcccccaccttgacgcctcctgcacatggcttctttcgtcaatccccgccgcatttcctggattgctactgcagcccaatactggcgcggggccaaataacgtacctaacactcgctctgcagtcatatcacctctagttgctgcacgctgcacactgcgtacgactacagcaggcgggcaatgctccaaattgagacatcactactgcatttcccctcagcatgacacatatacagttctagacacttcgacgcaatcctgctacccgtgtcagcacccaatggctgcgaagcccctcgcgtgcaacatgcaatttaacctttttacaatcaccctctcctccccagccaaatcccaaatgtacagcatagttatacaaacaagagaatacagaaatttcagaattcagtgaagtactcagttgacgcgcatgatgtcgccaccgcaagcgcccgcgttcggcccgttgtcgggcatgcccgctaggctaaacttgggcttgcaggcaatgtggattgcccggatagttttactccgccgtcccaaactttggacttttgggatgagcaccttccttctctggaatggactccatttatttgactgggtggtattgttttgtttctttaaagtgcaccctgcatgttttttgtacggagtatgcattgcggagtcttacatatgtttcttggatgctgttactttgggcagggtccaagggtatcagtccagcatgtcttggtggtcatgcatcgactcgatactcggctgcctacgatgcagataaattgaacagctacacccaaggctatgttctgtctgtcagtatctgtcagtatactgtcatccattttcacgtatcgtcgcaagacttacatccccactagtgttaggaactggtcccgaagaccccgggtcatgttgttccaaagttgcctgccaatcacaaagactgtatcattcaaaaattgatacgaggtacgcaattgtatgctcagagaataagttgacatatatgtatatggttttgtaaacacttggggcacaaagctcaaaggtggtggccccagaccattagacacatggagaataagatatacctactcaggtattgcgagatatgaaacattactttgactgcttaagggatatatatttaggactatgagctcaccgtcaatggccaccgtaggtctataaattgcgtgcattaatgctaattatattcatggctgttccctagatatatattcggaaccaaagtctgtatcctcgaactataccaagtattctatcgctcgggggttcacaagatacctaggtacataggtaggtaggtaggtatacacttaatgtaaacgtttagggtagagataatcacatgtcagaatttgtcttgtttgttcagccatgctgcatcgacaagcatgatgtttgtcgagacttcgaacagccaatcaatacaaacccagggatcaaggtcggtgccttgacgtgcggggatctgcctttaaaaccttgagagagtctcagtcaattttatgaggcacctgcagttgagttaggttgctgtactgtgccctaggtgcatctgtatgcaaatcacacaacatacagtaccaatctagccgaaaacacctaggtggtttcaaatgcgaaaagtcaaaaacaagccgaaagaagcaaaaggtacttgaaaaaagcaaaaaagaatcggttaagccgcatatatatattaattaaatgccaaagtcactagctccacgcacgatcccgagaaatcacttggcaaacagcatccagaaaaagcaaggtgagattgactcgctttgtctcccgaatggcgcccgaatagagttggggaggtcaagcgtgcagcatgatcctagtcttagtctcacctatgtgactagacaagataggaagggccaatcagatgcgaacatttacgcggatcacagatggaaaaataataattatgaacttgtccaagcccaagagagaaagaacaaaagagcaaagaaacatcaatggctcggctaatgatgatttgccgatctcgcatatgcttttcccaggatcaggtagtcatcaggcatctctcatcacacgacctgcacgttcgagtttgttgtacaccgactttgaaagcactgcctcgttccggcacagtgcaggacaaaactcgccacgtcagatccctagcacagaccttggcctccctgttattatttacccattactacattggtgcatattgtgttcccgtgactgtaacgacatgcgggctgcgcctattagtgcccgacccgtctccatacttgctgatagacgcgctcccgtgtggataaaggagggggttctatggctaatagaaaccttagaatcgaaatgaaaactcaagagaaatttaaaagggaatatagaaaataaaaaaaaataagttacactaaatggaaagttgaaccagaaaaaagtacaaaatatgatatattgtaaaaataataaaaactttacgatggaacgtcgcagcctgcaaaaaggcccggaatgggtcccctagcgttgggctttcagtttcgacaagcagcgctcagcccctgtcggatgggctagttttgggaacagctagcgcgtccccaggacaaacagcatcgagtggccagcatctttggatcgggtggaccttagagagtctccggagagtacgctagaatagagggacaaagctgaacaggccacgcttgagagtggggaacggaaagacgcggacggcaatgcagtcgattgggttcaaaaaacgtggcctcaaaggattgtcttatattggtactccattgtacgccgttttactccgtattacccacactgtactatatctacgtatgaaaacggaaatctcaacggggcacaatatgcatcgacctatttttagtaggcacatattgcaataaccatataatgtatatttaagtatctaatgcaactatatagatgacgtctataatgatagactagaagatatatgcgaactcgagatgcagacaaatactgtactgtaacaaccgaggtatttttgccagatggcacacatgcatagatcggcgggaaggccggagcggcccgtgggacaagtaccccgaaacttgattgattaaccctgtgagcaatagtactcgtattattacgatttacctacttaggtaggtactcgataggtatattatgaattccatggttccgtgggtgggcgccttacccttttccccgtcgctatgacaatctgctattattcatattatatatctcagaacccacattcccggtatattgcaaattacttgggctgaaaacttcatcagggattggcggtgacggggggcgtacgctaaatagttcccccccgtacaacgtggttgtggctcttggacaaggaacccgccctgtcagcgcagcgctaatgcaggttaccttggctcattatgggctttccggatccagtgctacagccctgggaacttagggcactccacccccttcgttctctccctcttgtcctccaaagtctggttcatttcagtcatagaaattaagggatccgctctcgccacactttttcctcccacagacttcgcgccatgcttccattatccaactatggtccttctatggatgctccattcgtgtcgaagagtggcgagtggtccagctgaaccccacttcctcagctgaagtctgatcgccatgctttcaccgcttgaatttttatttcagagtaccctacatgcagtagtttcatgtactttgatggactaggtagtcctggttagggcaagaaaaaccactacaaggtgtataatactgtcattaaatggttggactaaaacaaaataaaatacatcaaaccaacctcaatgcgcatgggaatgtgtcgccccgacccgaacccatcgccatggaaaatgatcctggttccgcggggccggttgcggttgtgcgactacggtccgaggcggtcgttcgtccatggacgggttacgcaacaagggtcactcggaggaattgacgtgcatggatttatccatgcaaatgagaggtcacctgccacattcttgatgatgtcaagtttgacaattggaataatcgttctgatcatgtagagctcttattattattctgtaggtactgttcggtaacactgtagagtggcaaaacgtggaaagtttactctcgggcgctactgctagttggggacaaaagggaaaaaaaaaataaaaataagaaataaaagaaatgaaaaggaaatgaaagtgaaatcagaaaataagagcggtcgccgttctcggcttcatagcaacgggaaatctggtaccctaaattgcaatccatggttcaaagccttgtctcccatgtttcacttgacgaaatgagagcgtaatgtaaggtcatcgtactcgatgtacccatgcaaagtattcgacatgggcacacaacctgttacatacaaggcgtccacgagcgtatagatacactgtacagtaatcccccctccatgtctatgggtcactggcgccgctttagcccgcgctgcccgggctccaccccgttctctaaaaattcccctgtgcttttccaatcaaataattcatttccttttatttcctttattctctgcccattccgatctgagcttctttttcttcttctcttctctgcttatcttgtcgtggggttttcaacttccttatatacctgctcacgtcataatcaccgaggctctgtctttttctttttcctttttcccttttttttccttttttttccccgtctgctttcctatttcctattttcctttctgtttccgttctttttgggatcttcctgcatctgcccttcttccccttcccctgcgtgaccgcgctatgctcacgttgtccgtgtgattcgatctcccttttttacaactcgacgtcacatccctgcatccttgactcacctcgtcttattcttaccccagcaacacaaatgtcgggtcttcccccaacaacacaaatgtcgggcaatcccaacgatcacgaccctagccgtcagggtgatccaaatcgccaggatcctcgagacccaagagacactcagtggaacaatccgggtgaccaggcttcctacccagtatgtcctgtctcagagattcccagcgctgtgacttttcgatggctccggttgctgatagcttcatagtatccgccgacttcctaccctccgccacctgaccaggaccgtgcctatcaatatccccctcccacacaatacgcgccatcgcagtatccccctcctccgcagtacgccccgtcacaatattccccggcgcagtatcccgatccaaggtatccgcatccacaagccatgaatgctatccacggagcgcaagatccctaccgtctcccacctccgccgggtccttatcgcgccgatgcatatggaccccaagcaggacaagggccttaccaagcagcagctccgcgacagcgaacggccattgcatgccggtactgtcggcgccggaaggtacggggagagattcctccccatgtccgagttaccatgcactaatttctacccgacagattcgttgctcggggttcgagacctccgcagatggacggtgtagcaactgcgttcgattcaaccaggactgcatgttcactccggtctcatcgcaaacccaagcttttgtgcctgcacacaccgcttaccctcatctacgacctggacagaatggaccagggggtcgcggtgcaccgcctgtcctgtacggcgcccacggacaacctctgccccctcaacagcagccacagggtccggagaccaccttgccgccgccccaagggatgtactatcaaaacggacgacctcccatggatggtgccccgctgccccttgcgtcaggcatgcccgatccggtaaggctgccattccccctctggtaagagggatggacgaaacagaaatccgagctgatgttttgatgcgcagagacaccgtcgcggctcaaactcgggattcgagtaccccgatccgaccaatctggctcccgtgacacccgctgggtctgctccaggataccaaactcacactacgccaagcccttacgcatatccccctccgcctgctcacgatcgacgcacctcgccgccatcggcttataattacgatgcacgcccctcctcctcacctcacggctcgcccttcccacctatgcagcctcatcaggcgcctatgactccccaccagggcagcgtacccccagtagtccaggctcaaccgggcagcgcgccaatcaagtcaagtggcacccctcagccagggggtgtgacaccgccgccaagctctacccccggtggttcgcaacgaggtggattgaatgtgcgcgatatgctgaaccctggcgattcccaaggccgttccagcactgacagtgacatgcttaacgcgctgaaccgccgcggtccgcaatagtaattcctacgttgctatttgacatcctagttgaaactaggaaacgcacgaagaatgcgacgcgggaccggtgaggaatggggatcaatcggaatgggccgtgtgctggccacacggtccgagagccatgtgtcgagtgctggaattttaaggaagatttgaggtctcgtcggacctttgtggacgcattaggctgcaaggggagttcgggatgacattccagacaatgacgagtacctggacgatgaacgcgacaagaacatcactctctgatctatttataaggtcataaaacgcgaacccacgagattcacgagcacgaatttgaacttgaaactgagatttccaggctttatgggctctggttctatcggcatatgaatttttacttatctctttttttcgatctttctcggcttcgatatctgaataatcgcaattcccagaattggatatcctcagagtgtgatttggcatggcttccaggtgcatgcagttcatgtactttcaattggtttacctcgcatatcacgcgattctagcatgaatgcattctggactcgcaccatcagatcactctctccggctgtcttctccgaggaattcatttcaccgctaccgggccgcagaaattgtcattgttatttgaatttcgggtggctatctgtttttgcaacttgtcttgttttcactcatcgcgtttttgcactgctgtcggcttttgtcctttcctcgggttcttcattccattttatattactgggaaggcattcgtctctttactactcttttacatcttctacgatgtatgtgtggccatctgtttttttcgcctacgcgactaaaagacgtgggtcggctgtgtcatctcttccctttgccttgattattctcgttggaactgttttgatctttttatatttgttgctcattttcttacagttgcctgtcttttcgttatcaaatatctgcttatacttatatccggaggttgtctgatcactctttctgctattcagttattgccgcatgctattccactttccgttgggatcttgtatctctgagcgctttctgatgaaattctatgatgcgaattataccgagtattcctccctggctttgcagatctagcagacccggtctggtctctgatccagtctgatccgggcaagggccattttctagtttcctctttattctggggttcgccttcccttacttcccacttatcctcttttcttatcgagagtggagtgctagaggggctgaacgggtttccggtgggactattggctgtatgctttgtccctgcgaagggggagtcttggctgcataatggagctcgagtattgcattctttacatgcgacatcatgcacctaccccatccagcatgctgcttagaccgcgtatttacttatgtacgatgtaggccagacaggggcaggcgcttacggaggtatctatgcgaaaacctaccacgtgacttgccctaatccggagagggtttgagactacaatgtttacgtcgaggatagtacaatgcgtggacagttactagcacttgaatgacaccatttaatacacattttccttcggtgatttggagcagcgagggcgtagatggtgtacaaatatcgactcgccgaaattaagcattatgccaaggtatcgaagtgcaaaaaaaggaattgaagggagtgagaaacgagggactgagaaatctgctggaattgactaatgggaaggaacccagaaataacacacaagctgaaaagaaatggataattaacaggtagagaaagtggctgacagacaagaaatgatcgaggggaagagagaaatgaaagtatgaaagtggcctgcaatactaggcctgtgtggtttccgggtcttggatgagatgaaaacgagtgtggatgtgaatggtcgactgtatgagatgaaagggcagtgcttttgcagggctggaacgcagcatgctagtgtgggttttgcgagtgaaatgtcgaaaagtgatagacaatagttggctaacagtatttgaagatattccatggtgagattgaagggacatcaaggaaatgcgtcgtgaaataacttatttgtggttagggacagagtccagaacgcgcgccatcttctttgcacgagatgggtcttcaacaaccatgccacggcgcgctagtgtgctctgtacagtctcaacgaccttgttgaaagacgaagcagcgccacgctcctgtttgaagcgaaccaagctgaggttggcttggtgaccgtgctcaaggacagtgtaaaattcagcagtgaactcgacctctcgaagatggaggactaaagggcggttagtacaagtgtgggatcggatgaaatgaataactcacaatttgcttcgctgacacggccgtgaacaatgctgttggtcttgtccaggtacacatcctccatgccgaaatccctccactcgcgaaggagcttgtagagttccttgcgtcccttgacctttgatgtgttcagtgcaatcacttgggtagcaggctttatctggaagacccgggcaaaccagttgtggttggcaattgagcggcgcttgtggcgggataggcttggagggtcatcagcttcaacggagctatccgtgtctgcaagtcccttgcacatcaaagaagagtaacgattatccttggtgggcacggtctggatgtctgtcaccttgtctatagattggttagaatattggacggaagttggcgatgttgcactcactagcaggaggtccttgcatattctggttggacttcttggtcaagagtttcttgaaaaagccaccgccaaagcgatccatagacgtcttccgtctcgggacacgctctgtattctctgcattgggaggagaagcaggttcgagggtaattggattgtgcacagttgtgcctccactgggaacaatgaggtggctgtccttgggtgggagagcagggggattatcagagccctgggagcgatgcttgaaccatgaccatttcttcccttcggaggcccggtttgtggctttcttaggggacagcggaacttcttcgattggagccagcccactaggttgaccagcatggcgagatccaatggaaaagttccgatcgccgcccgcagagtcacccatagcaaattcatgaacatcggaggaagcaaatttgctgtagtttttcttccgaatggtcaggggcttgacttcctccatagagcggaatgagctgtgtggaaccatccggattgttgccttagcatcgccgccctgggatgtagcgagggaagcccttggcctttggtggcgccgagggctagtctcactgggtgtgcggacagggcttgcgccattctcactgatagcagggaggaaggtctcattcggtgaagtgatgaaaggatcttgggaaggtgctacatccaactctctccgtgtaccgttctggacctgatcttcttcaatcaagcgatcgagatgagtgatgacaccagaaagataggcagggacattgtcctttcggccccggctgtgctcaatgagcttttggcgtgtctcagtaagttccttgatattgtaagatcgggctgactccttggaagtattagacaccgggatcgttgaagtaggctgagcttgctcggggcttgccattgagactggagttcctggtgtttcgtatccagatgcgccgctcgtagtgcgaatggttgtagcagagcttccattgaatgcctcctcgcagatctggctgagctcatgggagacttttcgagtatcctccttccatgtgtagtctgtatcacgaactttcctgatttgccccaagctcttaaccttcggaccattcgctcgcaccacggttggctgtgcgggtaggggcgggctgcttggcatgtccgggagatcaaggccatctgccataagttgcaagctgcaggtgctcggtgaccgcttaatctcattttgctgcgttggtgtcgcaatctttctcttcttgggtttggccgatgtagatccatgagaccggttgcgagcgtggcggaaagaaacgttgcgacgatagctcatggagtgtgtcgacattccgcgagcgcgggagctagaatgaggtaccttggaggagacgaaagacttcatggagctgggcccgtgcttacgcttttggagaacagtaaatggtgagccatccggcccatctgactcctccggctcttgctcctccgcaatggaaggtggaggcttcaccctcggcgatgacagaatagcttcggggttttctgatgactctcggtgcacagtaacattggcatatcgtgcttcggagcctgtgccaccatgcttgggtgaccggtatgggtcatagctctccacagtacctgaggacatcggttccttgaaggagctgaggcggcgagggaactctttaacagatgggaactgagcccgatgcttagagctaccctggcccgtctggctgcggcctcgacgaactctaccaccggggcgggagatgtgatgataatcactagccgagtactctagaggctgcccttggtagttttccagctgctcatcccggaattttgccaaagcgttgtagaacatccgctcgtgggtcggtctgagtgtgatttgttagcgtcattgagctcgtcctgggaattagcagggggtactcactcaatgcacagaagcctttgaattaggtcgtcgaccttaacatcatgccacaaagtctgcagattgcgaaggatatcaagatcaatgtcctgccgactggacagggttggaccgcagtcattcaccgacagggcaggtggagggccaacatagtgatcaaccatggcattgtgaagtttttcatatttggttaacaacggatgcaaccaaatgttttgcatagatatccgatcttcgggacgcttttggagaatacgctggatgaggtcggctgcttcatcgctcaactcgggaggaatgatatagtctcctttcttcacaagccgcagggtgcttcccaagtcccctccatcaaaaggcaagtaaccagtcaaaagggcatagagaattataccacagctccacatatcagctctgtcgccgcggtattttcgaccataaatgatctccggtgctgcataatgagggctaccacatgaagtgttcaaccagtggcctgctggttgcagtgcggccataccaaaatcagcaagcttgacattatggtttgaatcaagcaagatgttttcgggcttcaaatcgcggtggcagatattgaaacgatggcaatacccaagggccgcgatgatctgtcggaatagtcgcacggcctcttcttctggtagtggaccattgttagatacataatcaaacaactctccaccctcaacgtgctcaagcacaaggtacctagctatgatgttagtgtgttttcgattccgaaggtggtgtgcacaaacaattctccccggttttcccaaacatcatagagactgatcacattcggatgttcaatcaacttcatgatgaccacttcacgttcaattccacagggcatttgtcgggaggctgagttggtagggaagtttcccatattacggtccatcgccgcaatactctcactctgaaccatagcagctgacttctttgaaacgatcttgatagcggccgtgtgcccggtgacagcatgcttggccagtctaacccgcccagtggccccctttcccagtgttcgtcccagctgccatggtcccacgtgtgtttttctttttcctttggttgatagaatggatgccgcagacatgatggagtttcgggccgagtcgggctgcaggtcggtggccacggagaggcgctcattctccttgtttctttgcggggttggagtcataagaacagacatccggtccggactcttcagctgctcggattcctggatcctcaagcgcggtgtctcgatatttggcgacttggagttgttcatccggcttgacacatctctcaagggctgacgcctgtgctgatagtcattaacatccgacattatctggtccatatttgtggtggtgcaagacgtgttggcgtgtttttccacgtccccttaagcttgggcggattagtcgtcaatctagatccccattagctgaccatccaacatcaacaatgatatctgtacccaacgcacagaaaattagatgaaacgcaaaaagtaccactccttcgagtgtcaaatgaaaagaagctacgtgtaaagatcgactccagaactcttctgggaaaggaaagaaacaaaaagagtgacaaggactggtcaataccacatcatcgacgaagatgcggaaaaaagaagaaaaaagatctcgagcaaggaacccctaacgactgaacttgagatgaaaacacaagaggaaacaaaccatcgggaggtgccaatgttcatgaaggacaagaggttggcttgcatgcttcggctggactggaatgagagagattccttccttcccatcggaatgtccatgtcctcagcactctacggagtattgtttactgtcttgtttgactccatggcatgtttgcctattttgtcggatttgacctatgagcgtggagctgacgagacagaaccgtccaaaattccagatgtcactattcacactttacacctcccgagactggcgcctacgaaggcgcctatatgaatgaacttgttttttctttctttctttctttctttttttttaagatgaaaagaacacaatctcaggtccagactcaaatgttatatgtactcaacagtttaaactagtataatgctttcattgtcaacatcaattgcgatcgacgggggagatggcattcccccaaagaagggggacaataacaaatcaatcaaccagggctattagccattttatctgtacagggatctatttgtattgaacattccacagtccaaagccattcaccttctaatatccggttcttgaggccaaattaagagtccagaccaacacggcaacggcatatcgttctgatatctgtagtgataatacacaaccacatccccatccccaggtcgagttcaactattcatatatatatatatatatatatctgtatgcatcgtaacattaccaatgctgctcactaatatgtacattgttcacattaacctcatctgcaaaccatcgcccttcaccattaccttccggtccgattagaacgtcgtttccactcatcatacgtttgcgcatctttcctgtctgatcaaaagtccaatcttccaatccatagcatcgcttccagcgcattccatcttctgcatcctgaaactcgtaccagaactgcacagcgatgcgatcatcccggaaagcgaaaagttccttccgaagtcgataactacgctctcgtttccatttcgcttgcaagaacgcgatgatagactccgtcccggtgaaaaacgagtctcgaacacgccagatacatgttggggtgtatccttgagcgactcgggcagggtccctaaatcgcacatggtcagagcggggaacgaactcactacgtcatttattctcgcaaagcaaagagcaagagtccatctcaagaaagataatcccttcttgttttgagatatgcccgcacctgcccgaggtgcacagacaaacaatacaagtcggcaagaatgcaagggatgaaaccttgccctttcttttgaacacatggtctgtcaagggccgtagagataggaaatctgagacgtacctcgtattccacatatcctgcgctgctttgacctttttctgcgcagtctcctcggtaaatggcggtttgagatctgccatggtgggaatttgggatatggaatcagatttgtgaagttggattgtgagggaagcttagccccttcccagccagccttacctacctaagtacctgggcccgtagacagcgttagtcatgtccacgtgaggctgtaacaccaagggtttcgtcgcctacgagaaaatctcccaacggtgtgcatgaacatagccacaaaataatttcatacgtgattggggtttaggcaaaatcgatacttagtaccttagtgattagactggcagccatataaacggcaagcagatatcgtactggattttgtcactaagaatatacatactctggcctcagggtatctgatataggcttattcaagaagtaaataaatgtcttctggttattcatgcctaaaagtggtaggatataagttcagctatttgtttataactgaactttgggctgaatattgcagtaatgtgagaaatatatatttgctttccaaccagcatccgatctaccactatgtcaaaaaagatatgcaaatccagcgctaacttttatttgagacgggattaaagaaaatagacactaagttgcaagaatacaaccataaattcatatatggtggccgtatttatgatcgttgcggcttccaaccttcgaagggttggagttcctctagttgcgccaagccacagcgccaaatgaaccatgactagggcgaagtccgagggcacccatgacagttaagcctttgttgtaggaacacgattatgcattgcggttgcgggcaactgcgccgaaggggttgtgttaagccacatggtgtctaggcttataattctaatggttcttccaaccccttcagaaaacatcctggtcaatgtgttcaaatgaatatccatactaaaagtaagactcttaccacgactatcaagtcttacatgcaatcgtagactacttcgttttatcccaactacgcaacagtaaccctctcgcttagaaccaccgggcattgttgagaggtaattatttcatttgcccgcttcttaggtagtgtcaaattttcacaaaaaagaaggaagaacatctgacatcagggtgagtcgttcaccagctagacctcaacttttaaggatgatcttcccatatctcattaaagtacatgaatacatctcgaccttccatacctgacaacctgacacgaaaataagctagtatctactagcattcagcttctgcggtcaacaatagtcaacatgcaatctgcgggcaagccgactcaaccaggaattgacctggccctgccaagagagaaaactcaagaagaaatcaatattgaaaagagtggagatatcgatgctcttcaacggtatcggcggaacgtcgttatcggacggtcgcgctatactggtcgagtggttgagcttctccggatagaacaagaccttcgaagcactgcccaagaagaacaatacctctctcagaaaaccaaaattacaggcagatggccattacttaggcatgatatacaggccgaactccagactttgaataagaggtattggttgctagagcgccagtggtgggaagcccgaaactcatttgtggaggggcctctgatacgagcatttgacctatggcgatcacatcctctatggtatatgcacgagttctgttcgaggattgtgtaaggcggggaggatgctgtggccgtagctgtggatgttgcgttgatcgcaatattgataagacaaggcagcttggagctggacattgtactatagagtgtggatgttgtcgtcaaagccggggctttgaccttactaaaagcgaaaagaagaaattgcttaaggactttcatgtcatggatgacaatagtctttaccgtgagaggatcaaccgagtttcaatatgggggttatctcttgatagtcatgacagccccttcgatctgattataactctcccaggatgcgagagggggctttcaaaagagcgaatgtcaacagccaaggacgaatccgctgaggtattcatgcttggtgacgaagaggactgggaagaagttgtggtaccttaagcgtctgtgccagaccaaggtgccagatcaaaaggtgcctacttgctaacttggaattttcttatggaatgaagtccctttggatttgaatcccattaaagcaagttgttaacaccgtgagcataacctacttggacatgtattgttccttcctatttaggaccatccgtgcctgccattgtacttcatatctcacgtggaccttccactacctgacaaccttacgtagagcaagattctgattctgtaaacttcgcaaactatcatcgaacaataaatttctcatcgtgagtcttgccagcactctttctactggtctttttaaaggtctttttggatgtctttttgctaacatagtctgccctacctaagatgtctgcgagtgcccacgctatcggcgatgccccgcccgaagaaggctcctttggccccaatatctcgtttcttgagcgtctgttggccgctgtgaccccagacttcgcggcgtcatttctttgggacctggccaacatgtacatttgggtgctgttcgcaagacgcctcgacgccatgatagagcagtggactgacttgtatgcactcttcccagtcctcttcccagccctctttccaacactctttccaacagactctccaacactctttcctacactctttccaacagactttccaacagactttccaacagactttccaacagactttccaacagactttccaacagactttccaacagactttccaacagactttccaacagactttccaacgtcggctactaatagaaattatagttacttcccccttccgggccgcgatgcgcgacccgccggaggcaatgaacccgccgaaggcaatggtcaaggctgaagtctagtaccagataagtccattgtgcatcttgtgtgtgctaaattataggtactatatactattaactgaaaatatacctacctacatattattaggtcggtattctttatgtttgtgcatcccttttctcttttcttgacgcactggattgttcggaagtgctaacaaattacgctacagatcggaccagctttccctcttcttgttttttattctattttttttttttttttttataaataatatgtgggctctcaatatataattacagagagcaaaagaaatgcaacaacaatcattattccttcatgttggttttgaccttcgtagcattagcaagtatggatgaagcaccaacatattgtatcaatatagtcaacccccatggtagcgtagcacgaagtgtaatgtagaatgagaatcaattggaagctgagtatctaagaacagtacatatttttggaacaaaagtacatgtattaacaaatgcattgttctcaatcactactgtagggctctttgtctcggacaaagcaaagtctaggatgaaagtaatccaaatccaatgccatggatttcattgagctccagggctttcttgatattctacaaatacatgggtttacttccaaaccccatattctcctacagtcttccccacccaaggctagtaccgcaagtacttaccacagaactctacctttttcaaacaaaacttattacccaccatgtgcaaagtgcgttataaatggtaccgcggccactgtggcatcagtggttgtgggcacacagaagcagtgtggatcgagcgctgcaaagcagcgaatgcccgtgagagacgagtaccttgcccgaatccacgtcctgtcctccgtatcaccgagtcttttgcgatgggtctttgtcgtccctgtcttggttgggcggtgttgattccaggagctcctgaattgcttgaccctgagcgggttgataggcctcgtcggcaacgctaaatattgactcatgggcttcctaatctgacttctcgcgtctaaaataattcataaataaagtgaaattgtcttacttttgaagatcatagtagacctaggttgaattttggaagttgggccttcagaaaatagttcgattgtacattgtaggtctcgacatcaaggagtccaagtcggttcgatgatcgggtattattggatgatcctcaatataccgaatgttgcctgatcctcgatggaaccccttcacaacctagacaagggttgaggtggaatcgccgcagtttgttgaccgcttgttgcctctaagagatctacgaccagtggtcccaccaaagacatcttagacttttgtaccaaattccccgacagcagtataaccgaggaagatgtgtgtggcacgtattccacaaaggaattcgggttggtgttggtatagcaagaaaggggtatggccaaggagtcgggcgcatgcgactggccaatttccgatgtaccggtatctccagcccccgcatcgataatgacgagcgacgagggataaaacccggcattccttgtgcggattccagcgttctttttaccggccaaggtgctcacgtaggctatttggtcgacttgttgccccaggaaaaatcgcacgcctgcatcttgtgctgcacgatagacctatatttcaatatagccatcagcaatcattctatttccgctttttctttattaatataaccggttattaggggcacactacatttgtcaagtctccaaaggggatgtagtcatctttcgtgaacacggagacatttgtgtagcctcgtagagaaagatgcagggctaccgagaggccaaaagcaccagcgccgacaataacgatataatctgaagttgaaacgcccatgatgaagtaaaataaagtacatttcttttatttgtgggttattgagctgatatagtatattctccccgcatttcccccaaacaggttaaattatacggagttggagaaaagtgccctcaccagataggagaggggaaagtatgatcgggcggactcccgagcactcccgatgttttctccaattctgctgttctatatatatttcgtagctcttgaatcgaccttaaatcgaattcgtagaaaggtgctcattccaaacaattatagacttggcccttatggattgaagggaccaaaaaaagggctaagcctactccacaacatatagtcaaattgactgggatgcatccaggaagtactcgaagactcagaaataaataccaacaagcataaatttcggagaaagcactttcgaatggcttgaaatatcccgacacccatgaagctcagcttcgatccaagcggggtattcaatgttctccacactcggaagggcccccgatgtgcttcagaattccaagttgtcttgtggtttggtttcattccaataacttattcacttggattgaacctcaattaaatcatggatgttcaaaatggaaccctttgtatcctaggttgtggtaagtaggtaagctcaacacgcaaaatacaccgactaatgctcccacttggtaggaaacctgggcattgccatcatagatggcttggtaaatgcacccgcagagaagtctaaagagttaccatttactcgatacattgcatgcgtgcgcagtgaaaactcagagaagaggctggccgagcgattcgtcaagtacttggacaaaataagcctttctcgtggccacaatgtacaggccgtacacgacgccgatgtggttattctaggcgcagacccagccgatattgagaccgttctgacgcaacccgggctccgtgaggcctttgccgacaagcttatcatcagcattgcagccggctggacaagacaaaagctcgaagccacaatatacggcagcgcaaccaccgccgataacacagctggcagagcctgggtggtgcgtacattgccgaacatcgcagcccaggtgtcccaatcacttacggctattgaaacatcggagcctgcattgcccgaacagtatctccagataacgacatcgatcttcgagcagattggcaaggctgtccacgttgatccgaggttgatgaatgctactaccgctgttggaggctcaactccggctttcttcgctgtggtttgcgatgcaatgatcgatgccgcagtggcggttggtatgccgcgggacctggctcataccatgatcttccagtcgatgcaagggacggcaacgatgcttcagagcggcatccacccggccctattgaaggatcaaggaacgtctcccgagggctgcacgattggcggattgatggtgatggaagaggctggcgtgcgtgggcatgttggacgggcgcttcgggaagctgttactttggctcgtttgatggaaacaacggcccatgtcaatgatacaagacattgagctgctattttgggagtcaatggtggccagtacgctggatgtgaaaattgttgtttttgtcattgggattgaaccagagggcagcgttcaataatatgcacatgtgaaacattacatcaaagaaaagaaacatactatttgcaaccgctatccatcaaatttgggaccaccacagatccactaatcccatgctctgatagagtttcaaacctttctgaaatataaacattagaaccttgaagcatcggtgacgactcctgactcctgacttctgagaaggtaacgagatagccacagccatctataccaaacggaaattgccagtttcacccttctctatgtattgtagcatcgggtaatccaaactctgtatgcagatcttccgtgagctccagttgcttaatgggtatacagagaagcaacccgacaccaccaaacggaatcgaaatccaccaaacccatcgtaaactatcttgataaacgccgagcacttctgccataagattaggggtatcatgcaaagtacgcatcaggccttcgctggccatggcatatgcaccgccattagcaagctttgcacgcagtgtcacatcactgacgcgatacagcagctcctgaacacgtgcgttgaagatagtggttggaataacaataccccatatacaaccaaagctgcgcataaaggcccaggtggaggttgcagtagccacatcggactcgggcagcgatgcctgaatcggaggcagagtgctggagaagatcataccagaaccagcgccgaagattatctggaagccagcccagtcgcgagcaggtgaatggtcatctaggagcgaaaagagaccactggcaatagtgaggagtatatatcccaggaagtggaagactcggtatttgccagtcatagcaatgatcactcccgtgacgatgccaaaaggcgcaattgcggcagtgataggaagcacgtatagcccggattccgtggcagtcgagctacgtacagcctggaagtagactggtaggaaatatccaacccagtacagcaggacagactgaagaaaggcaatccacagtgcacacgacccagttccgcttgagaacagccggaggggaatcgagggctcaacacagaatcgcgacatttgatggccgtaaaaaaggaacaggcccccgagacctaggataagaggcacgagaactcgccatgaagaccaagcgtacgttgtcccggcccaagtgagggcgagcaaaatggagataacggcagctgtaaggatggtattaccaagaagatccacgcgcttgagctggtgccaagtggtgccgctgtttcgcgggtgtgagactcgaaggaataacactagcagtacaagtgatgcagcacaaagcggcaggttgatatagaatacccaacgccacgaggcatactgggcgaatgcgccgcctagaacggggccgatcaccgttccgactgcccacacagctgccatgagcgcgacatatttacctcgctgacggaggggaaccaggtcacagatgacaatatccacgagggtgttgataccgccgccgccgatgccttggattgtccgtcccgcaacgagaagtccagtgttctttgcgccaccggccatgccactccccaaggcaaatatgacaaccgagataatcaacatccatctccgaccgaatatgtttgcggtctggccaaatagtggcaggacaactgtggatgacagaatgtatgagtttgtaatccacatgtacagctcgccggcatcaacatcaagggcgatggtgggaagagcggtcgagagaatggatgtatcaagggccgagaggaaggtcgtcacgcatagtgctgggaacacggcccagaagcgccatgttttctttggggtgagacggtcatggttaggtcgcgttgataactcttcatgttcttgatgttgttctgctggtgcgcgaagaggctcttgtacaaccggttcggtcgctgccgatggcttttccatgtcttttctctggacggtaaatctactgctgccatggtgtggacctatggatgtcgtgaaatcagatattagggcatgaatatggagcttacactagaatcccgaaatccgctcctcaaacccgctccccaaacccgctccaggggagaatggtccacgggtgttgatctttatctaaagggagttagaggtggcgtacgggtccgggaaggcgatctggcggtatccatggattctgcctgacaggatgaccaggagtgcgggtccaccaatgatattctaatactggtaaactgtgtgggtctcatgaaaacggcattaacaaatgcggaaggcggtgaaaatttgattcaactttcgccccggaactccggagactatgctaatcttttgttcaatggaagacggcagattatcccaaggcattgccaacgcctccctattacgcctaattctggctgaacccgccgaaaaatcttactcctgcagtcagcttacccatctcttgatgcatagcacccatgggacttcttatgacagatgactagcaaactattgcttctgatccgacagaggacgcgggtttaaggaccagatttaattggcattggagaggtatgtacatcgcaattcgttttccgacagactatacgtagtatgtacttttggtgtttatgtagggaaacccctggaaacaaaatatgcgaaaaggagcaagaggccgcttagtcataattaaaatacggatttgttcttcatttcggttctgcaatatttattgagacctcttcgcagtttccaggtagaaactagttgactgaaagatatcaatctacgttatcatgcaaaccaaagaaaattgtatattgtattcctccgttgacacagtcccggtgactataagacttcgggtcgagggtgaaatggggtcggcccgtaccgcaacgctagcggtatcttgcactgcaataacaccctagccatcccgtaaactagatatctcagacctcagaagacaagctgctaatgtccaagtcatctatgcggtctttatccgatgttgaccagcgaagattctccactttcgtgcagacccaacatgaagcatacatattgacgcgatcaatgcaggcgccacttagacgtgcaccaactcgtttggggaaaaagccgtgggtctcgaacgtcctcatataccaagggacaagtgctgaggagcgtaggagtacgcggccacccatcttgagactgctattcaatttgataatctgagaggccgcagctgtgcccctcgggtcgaaccagtccatgctatccatgacaacggcaacggtcagtgtattaggagttatgtggctgagaacttcgtccacctcctccgtgtggatgcgcagaccgtctagagcacctgggctagagagcttagcataggcctcctcggagagataatctgggtgacacctgcgggtgaaggcgccagtcatgcaaacatggtaataaggattattaacaccgacatgtgtctgctcggcgactggatcaagggtattgaccatgtatctccatactgcatgagagcgggtgttgcgggatgtcgggttggggccactgacagcctcgctttcggcgtggtcgctttcaatcatggccagttgattcttggggacccctagagcggcccagagaaaactttcttggctgacaacaagtttgcataccagttnngaaagcaagaccgggcggatcctgctgacccagatatcgcgttgttcgtttagggtcttcgtggcaaggaaatcccggaaggcggcacggcagccggaaataagtgagatccaacggacggcacgaatcgcatgacgcgaacctcctgtatcatataaaccgttccctctggtattaaagaaaacatgggcgttatcgaaccagtactgaaatgctcggctggaaaggtgtggagagagcttagtgagtagcaaggtacgaaaacaggggtgttttccctctccaaagagtctccaaaagtcctcgtaggataaggccacgtaagacgcaatctttagctcgagaagatgattctgcgtagggttcagatccacagcgtggattctcgccgggctctttgtcgcataagagagtatgttatctccagcgctggtaatggccaacactacatcttctgtccccagattgagcaagccctcatccgctcgagcatcttcccacgtaaaggcgtaaatgtactcgtcgttgaactgtgcgtgcttttgaagctgatcattatagtagatacgccagtgatggttttgatagaaagacgagggcaggggcaggtttgcagaaatgttctgagtcgcagctgtaaaagccccggaacgccttttcggtgcaagtctcgttaccgcaccggtgaaagtgcaatcctggctctggttgtagggagactccgtggcgaaagcatcaattttctcgataatctggtggggaagaagcgcacaggaaaagtgttccttatggcacccgacccatatgtagtaggggatgcgaccgagagacaagttccgggtgtttacattgagaacagtgccaaatttgtactcaagatagtctcggcgactaccctcgagacctacccggtcgaggtcgaaccatgcgcgccagaaggacctcaggaaccaattcacatgacgtccgagagaaccaccagtgtagtttctaaaagcaaagtctactttagactggacatagaagtcgacgacacctattagaccgtcgggagagatgagcgaagtcagcgactcaatgacggagtagtagtcgggctgtgcacatggattattagtattagcttattgcctttgagacgtttcttcctgatatttaccatcatggacaaactataggacatggtgacaagatccacacatccattcttggtgtggttgtggtaggaatcacccaaagtgggcgtataaccgccaggaaggccattttcatgattcccgagacgaaatttggccgcgtcctcgcaaacaacgatgacattcttccagccaagacgttggaagcgttgtcgagcaacttcgcagagggacggtgagaaatcaacaagataaacactcgagaaaaactcagggacattaacaaagacggacatggcctcaatattcctccccgttccgccgccaatctgtacatcatgtcagtttggatcgacaagcacagtatgcctcaccacttacgtcaacccagattatgtcctcttgcttgtggcttttggccttagtttttagctgtgctgcaactagcgcgagcatttcttccctgccttgaaggagagtctttctggttgcgtcgtaagcgccggcttgcgtcttgtagaaactctctagggcgtcctgctgggtgcctttcttgttgccactatgcggtttgataaagcaggagtagaagaaaaccaaaaacgacttgagaggactctggacctcgccattcttcagtcggtatttggacagaaacttggatatcagcaagccaccgagggctactgcgctgaatccagctaatattgttctgaagtcaaggtcaaacatgttaccaccaggagaagccatgatactctctcatttctctgggtataaagaggagtgtgttgaagctaatccagaacttatcagcaaaattagaatgtctccttatctgaagtggtggctttttggggtgtcacggaatgttagctcttccacagtgaacgtgcagcttctcctgtttctatgcagaattacatagataaaattttattcctgtggggtctacgagtgtgcagaggcacaagattgcagtcatagtacgtttaatgttatcaattgatactaggattagtagtgtcgctacgggggttatattgcgtggtgtacgtagtagggctcggcccccgcgtctcaccaaccattctcacagcccggacatgcatatgcgatgcagggtgttgtgaagctcgtatagtcctatctgcgttatgttgttcattgaaggaccagtgtgatgcagtctggtgacccaagttctagttctagacctcagggcttttgctcgatttcttgactgaccaatttccttttgaattatgggatccccaataagtgtatattgagatatggtactatttcgtaggaaaatactctaaaggacttctcaccttgtagccgaaattcaaacactagggccattagtattgtatttcaatcgggctcgacgcgtatactacaggacatcggtgccaatcccaatatattacatatccttgtgtattcacatgtagcaaagtaggtatattgactcatctttcatgggtttgatcggttggctagttactcgatccccctttttcaaaattattgtgtaggtactgaggctatgttaagacgttttcatagtaaggggtaaatccttgcccatcctataccaagagccctcgatacattatcaaaccggaataatatcctatgccatgccatgctaatgcctattgtggtatatactccgacgcacatgcaaatattccactaaacagctatcgaaactatgatacgaggataataatacacatattatattagctagaatatgcagttgtctcctgcgaggtaggaggcaccggagaccactgttgggaatcaagaaaaaaaagcatttagtaaattcagtgaaaattgcatctactcctgggtatatacgctgtatatataaattgaagcagtttatcgttttcagcttgatctgacggacttcgacaccctgacttggattcatatgcccttagtggattcctccccgtactagttttgacattctaacgttggtggtgcttttgacccaataatatgagtgactttcaagatgagggtattgccattgttggaatgggcaagtcgttctcttgtgtccctcttttgttgttccctttgctcttctgctcttctagcgcccccgtctcactttccacggcttatgtccaactccaactaacacctttctttccatcagcatgtcgacttcccggggatgttcaagacccccaatctttctgggatcttttgataagccagaaactcgcccgcggccctttcccaggtaaccgtttcaacgccgatgccttctacaatccccagaagggacgtccggggaatatgcggtacacggagggttattgcatctccaataaactggaggattttgatggtgggttttttggcatgactgccccggatattctgtgcctggatcctcagcagcgtcaattgctcgagtgctgctttgaatgtcttgaatccggaggcataacgctcgaagatgtttccagcaccatgactggtgtttatgtgggaaactttgccagtgactatgagacacttgcattcaaagagcctgagagaatcgagggtatggccgttctgggaatgggcaggacgacagtgagcaaccgtgtgagctacatgtataacctccatggaccaaggtttgacttctcctgtttcaccctgcacttccgatatgaggaagaaactacaatatacacaaagttttaaagctgaccctttttacaaagtgttactatggacacagcgtgttcttcgacgctatatgcactacactttgcagttcaagcgctccgcaacggtgaaattcccgcagcttttgtcggtggtgtcaacctcatactcacgcttgagtatcattttgctattggtcaaattggcgctctttccccgacggcgcagtgtcatgcatttgatgcatccgcagatggctattcccgcggagaagctatcaacgttctgtacctgaaacgtgtgtcggatgcaattcgggacggtgatcctatccgtggagttattcgaggatcttcattaactgcgtaagctactcatatcctgcccattattgccctttgggcgtatgctgagacacaaatgcatacagcaacggcaaaaataacggaatcactctccccagtgctcttgctcaagagctgtctatccgaaaggcatacgagcattcagggcctcttgactataattcagttggttacgtggaatgccacgggacaggaactcctgcaggagacccgattgagacagtcgccattggtaatgtgtttggaagccatcgtgagtggcacgagccattatacattgggtcgacgaagccacaggtaggccatggcgaagcatgctcagcaatcacgagtatcatgaaggtagtgttggcaatggaaaatggaattatccctggcactatcggagttataaagctaaacccggcttgtgagtatcatacacgcgaccgtaaaaaccctagctgacatgtctgacgttatagtggatctcaaaggaggcgctctggccgtggccaccaagaacattccctggccagaaggcaaggcaaaacgttcgtcagtcaactcctccggatatggcggtgccaacggacatgttgtgatcgacggtgttgatgagtatttcaagagcatgggtctctctaacccgtacaacatggctccggaagtcaacccttatagcacgatccttcagaagaagttcctgctgccagttatggggcatgatgagtactctatgcgaaggtcgttggaaattgtgacttcagtgttgggtagtcagactcacgacctccatgaacttctgtataccatgattgctcgacggacgcgattctctcaccgtgccatgatcccagtggaaatcagcgacgaaaagagattgacaaccggagacccagtaactggtcgtacgaacaacagcgtcccagttatagcctttgtctttacgggacaaggtgctcaatgggcagagatgggccgtcggttgctggactgttacccatcagtgcgaaaaacgttcaagaatctcaatctcgcactttcgcacctggaacagcgaccaacatggacccttgaaggtacgcttacctgtgaacgctcttctttgaggattatggtatactgatactcctatgccaattcatagagattctgctagagcctgcagagactagcaagattggtgaagtttccttctcccagcctatctgcaccgccattcagatttccatcgtcaatctgctacgcgaatggggggtcaaaccagaagctaccatcggccattcatccggtgaacttgccgcagcctacgcagcaaaactaattactgcagaagatgctataattgctgcctatctgagaggcgtgcatgcgacgctcactcaagccccaggaaccatgatagccgtagcacttagtgcgagcgaggcggagaagatcctcgctgagaattatatatcgccagatgacgccgttatcgcctgcgtcaactcgcctgagagtgtcactttgagtggcaagtccgagcctatggatgttattcatggaattttgaaacaacgttcaatcttgtgcaagagattgcctactggtgggaaggcttaccattctccaatcatgaaaaaggttggatcaggctacagtgaagctattctcgaggctacagctcgctctagcaatagtgccctggcacttggaaatggagacgacaagggacagagacccgtgatggtgtcgtcagtgactctggagcagcttcagccaggtgacattaacggaagctactggcagaagaatttggagagtcctgttctttttgattccgctatgaagcaccttctcagtcttcaatttggcccagaggaacgccacgttgactgcctcattgaaataggggtatgtgaatacctttcttttcttttctttttctttttttcggcttcttcgtctccatggcgtttcactttcgatctctggctaatgcttgaatatcctctatagcctcatagtgcgctcaaaggtcctattcgccagattattgcttcggctgaagttgaaaatatttggaatgtgagcctgggaattgctcccaaggtgacatatgaccagaccctggagcgtggacatgatgccgaagatgacatgttgcgacttgcaactagcctctttataaagggctacccactcgatctacttcaagtcaatggccataccacctatcgtccctccaggatcatccttgatcttcccaagtacccatggaaccacgagactccgcagccattgatggtcaatcgctctactcaggactataaattcgccactcatccacgacacgatttgattggtagtcggctaccaggaggaaaccgcatggagcctatctggagaaattaccttcgcctggatgatgtaccctggatcaaagaccatgtggtaagaatactatccaattttattccacctggaatttcgaaaacatgctgatctatacgacttgattttagattggaagcgccatcatcgtacctggcgcagcatacctggccatggctgttgaagcagcagcccagtttgctgaagataccatgcttggtggtccaccatttgacttcgaggatgcaaggtttcatcttcacactgtgacgataaaagcagcgcttgttcttccagccagtggcactgccgatatcatgattaacctacgtcctactgatgcctccgtaacgtccaacagatttgagttcaaaatctgctcagtggcggatgaacgatggattgagcacgcgcaaggtattgttgcattcgaaatgactcatggaaagaggacaaacaagatatccttcaacaatgagaccgaagaacccatctttgagcagaagtttggcaaagatacctggtatgagcgactcaagtaccgcggcttcgattttggccctctgttccgcgttatcgacgagattgaagttctgccccatgcttcccgtgctcgtgcaaaagcgcctatactcaagacagccgagaaaactacgctatatgagtctcgatatgcgatccaccctttgactatcgatgccgtactccaagggcgcgtagcctccgtatacaccagccgggcagaccaagaggcagccacccagatccccgtctttattgatgagatgacaattagcccatctttatgggcgagggaccagacgggcaccatcgacagtgttgcgtggactgagggtgcccgcagcggcggctcccactcaactctgactacagatagcggctatgagattatctcagcgcgcaatgtcaaatggcgacaatttgagaaccagggaagccaggaaaaattgaacaaggaagccacacgtgagccgtattaccgcttacagtggaagccagacatagatttcctggacacggatggggcacacagcctgtatcacagtgatttccattcgccagctggagcagcgtatctgtatgaggtctacaatattcgtacgcgactggagacggtgacagtcctgtacatctgtggtgccctggacatgttctatcaggacgaccttcccacggatccatccttaaagtgggttcacgggttttacaactggatgtgccacgtgaaggacgaagcgacagcgggacgcatgcgtctgtgtgagagaaacgctacgagtctgaatttccagcaacgagaacagcgtatcgcgcagcttctctcggagttaccggaggacttcccccagcttgagttcaacgccataatttatgaaaacatggttgacatactcactggcagggtggccggcatcgacttggctgtaaaagcagagatactggcacgagtgtatgcggacgggtcaatccacgatgcggcacgcaaaaacctatcgtcggtggtggatatactggcccacaagaatcccacgatgcgcgtgttggaagttggcgccggtacaggcagctgcactagcattgcgctagatgtgctcaacgtctacgatcgtgatatgcctggccatcatgccaaacgctatcatgactacaccttcaccgatatttcaccggcgtttttcgagaaggccgaggaattgttcagcgcgtatcctcctatgaattacaaaacattcgacttgtcggtagatgccgctgagcagggctttgaacttggcgagtacgaccttatcctcgcttctaatgtgatgcatgctccaggaaacacggataaactacttcagaactgcagtcgcctactcaagccaggcggcaagcttgtaatgctggaaataacacaaacaggcagtcttacccccgtacagtttgccttcggtacgctgcccagtttctgggaatgtctcgacgataaagatgcggaccgggtgctggggcccttccgtactctgcaatcatgggagcagcagctcaaaatatccggcttcacaggtttagatatggttttaacagactttcctgaaccattggccctggagagtgtcatggttgccagcagcatcaaagaacctttgagcagcaatggggaaagtattagccgtgttgctattgtgggtattctcctatcgttattttcgtcccttttacttctagtcctaacataatccttccaggtccattcaacagcacaatacgagctggcgcgagacatcgaggatgagattacggtacgctggagcctcccccagggttccatcgcacactggtccctcgaatccatgccttctaccgagctggtcgatgaaggccaagtcacatacatcgtgcttgaagagatacagaactccgtgcttgtggacatgcggccggagcagtttgacgggttaaagaaactcgtctcgtcagcgtcaagtatcctgtgggttactggaggcgacttgacagttggcaaaaacccggtactagcaatggcccatggaatcaacaccgtccttatgaacgaaaactcggtccgaaatctcaaatttgcaacttttgatatcgactatacaagcgccgttcagtcatttgacctcgctaaacctattacagatgtctggacgacagttgtcacagccgcaaacagagcgacgtgtgagacagacttcattctcaaggatggcgttatttatatcagtcgtgtcgttcccgatatggaactgaacgaggagttcactctagacacgggaacagggagagacgagcaagatttcccggctttcggtaatgtccagctggcactcgagaccccgggtcttttggatactgtgtatttccgagagaaaccaacatgtgacattgtacttggggtcgatgaggttgagattgaggtgaaggccgtgggattgaatatgaaggttcgttgacggtgtccctaccgtactatgcaaggtcaaaggcggctaatatcatgaccatggtaggactatgtcattgcaatgggcaactttgaaagtgtcaagtcaagcaacgagagcactggaattatttctagggttggagagaacgtcactcacctccagcctggggacaaggtcatctgcctggagcgcggctactatgacacgttccttcgcagcccggtacagaagtgcctgaagctcgacgacaatgctgaccttgtggagatggccaccgttggaatcgcgcatggaactgcaatatatgcgctagactatctagcgcatctagaagccaacgaaacagtgctgattcaggccgccaccggtggtttggggctcgcggccatccaatatgccaggtacgtgggagctgaaatctacgccacagtgggaacacagccaaagaaggactatctcatctctgagtgcggaatcccggccgatcatatcttctggtcccggactctggagttcaaggatgaactattcaagcaaacacgaggtcgcggtgttgacgttgtcctttcaacaatatctggtcccggattccacgagagcttaaaatgcctagcgccatgtggaaggcttattgatgttgggcgtggaaacgtcctggacaagggcaatatgggattgcatgcttttgatcggagcatcagcttcttttcctttgacctcaactttgtcctggaagagaaaccgaggattgctgaacggcaagaatcccagtcattatcccagttattacgcatcgaggtcactaatatgtgaaaacaggcttttgacagatgtgatagagctcctccgagaaggcaaaatccacccaattagactggataacacattccacatcaccgaaatggagaaggcccttcgatactttggtcaggggcagcacattggtaaggttgtgctaacatacggcccaacgtcgaacaaggtaaaactcaagggtgctcgccgacctcgaggcatcagcagcagcaacagctatgtgctcgcagggtgtcatggtgggctgggccacagcatggcagacgccctgattgagcatggagccaagaaccttgtcttcctaggtagatcgagcgagagcaaggcagaaatcgcttccttctgtaagcgagcacggggaaatggcgtcaatatagtgactatccagggtgacgtctccaagatggaagatgttgagcgagctgtggctcaagccatgtcaatgggcccactgaaaggagtcgtacatgcagccatggtgctacaggtgagttagatttcacatggggttttggatcttcgagtctaacatcatcgacatcaaggatgctttctttgactccatgactctggaacaattcaacactgccgttcgtccgaaggtgaacggcgccctaaatctccacaatgccaccattaatgtcaatgcgagtcttgatttcttcttcatgacgagttcaacagtcacatacgttggccacatctcgcagtccaactacgcagcatccaacgcggtgctggacaacctagcacggcagcgcatccacaatggcctaccagcagcgacaatctcactagggccgatcaaaggcgtgggcacgctgaaccgcaagcccgagtacgccgagaacctgttgcggtcgggactgattgaagccgaagagtcggagtttatccggcactttaaccgcttcacgcacccgcagcatgagtcgaaacacttcgacagtctcacgcagggtcatattctcactggagtcgagtactccaaacacgacctcagcctggtgcaggtcacacgcatagagcaagatcgccgctcagcgctgctggtcacgaccctcgagtcacgcaaagctgccggcagcagcggcggcgtgatagccgatgccagtggcgatgacctgctgatatctgacatccccgacgaccgcgataaggcggttatcgtgttggcagatgctgttgcacagcggctggccaagctcatgttcatccccattgaggacatcgatatcagccggccgttctcgcactttggtctcgatagcatgtccggcagcgagctgatccattggctgagccaaaagtttggtgtgggtatgtcatttttgcaactgctagctccctcgtgcacgccaaagagtctggcagcgactatcttcaatgcctttaagacgaaagccgctgcggcagatactgcagtaccaacggctaacgtagatggcatgactcacgaaagttcaaacggatctcttgagtctaatggcgtgaacggctccactaatataaatggttccaacggcgtggatagcagtttagctgggtctcagatggaaaagttctctcagtcagtaagaagagcaattgccgatccaaagccggtcatgcattcttatgtatgctcagttgtcaacaaaaaaggtgcgtatatgcggtttccatctcaaatgcggaatatactcattactcacgattataggcgaacaactctatacattgtccgagggcacactgtcacaggattccaatacaaaagttggctttgatgcggtatacggaatggcttccctcaccaaactcatgaccacaatcgcaatcatgatctgtgttgaacgcggccagatctccctagatgatgatgtaactccaatccttccagatctgtgtgctctcccggtcctggatggtgtcgattcagagggccaatgtttgataaagccccgaactaagacgattacacttcgattgctgatgagccatcaaagcgggtgtggctaccattcaagtcctccgctggcgagatgggcgaaacagaatggcaagactcacagcgtctttgacaacgactttgtgcgtctttttcctcctatcctctcacgtacgccacaattatcgatgtgcatctaacacacctcacaggaagtcatgaagacatacccactcctctttgagcccggagagggctggatgtacggctctggcaccgactgggcaggtgaggctatcgcgcgaatcaacaatactacactcgaggaattcatgcgatccaacatctgggagccactagacatggcctcgacgaccttccatcctgagctgcacccaggcatgatggaccgcctcgtcgcgatgtacgagcgtgcagatgaccagggtctagagcgcggcgcctggctctcgcgcatcccagctcagcatgactgcggtggccacggtctgtggtcaacaccgtgcgactggacaaaattcctcagcatggtgctcgcggacggtggatccatcctctccaaagccagtatcgatgagatattcgaaccgcagaccattgggtcgactgaccttcaggagctgctgacgggcccgctgcgcgcgtccttacgctctacggttgacatggatgcgggtcgcattgagatggcactaggcggcccgctgtatatggatgccattcctgggaaacgctctgcaggtacgctgcaatgggccggtcggccaaatcttttctggtggattgaccgggccaagggtgtagcggccgcaacatttacacaggttatatcacaggctgatgccagattcgaggagttgaccagcgagtttgaaatggcggtgtatgcagaattcacttaaatgagggggtatgatgtgtctgagaatcatcctggaatgttcaatttcttacaagtatattccgtacacgacatagaattgtagttaatggatatatggcctaaggcatacaggcatacaggcacaatagtcacatgaccttgataccttatcatcccaccttctgccttagggatctggcattttataacatcatcccccacctcggtccctcaatctttggccaataacgaaaatttgcctctccaagaacccctgagaacaactcagaacaggaatacggagtactaaatccgaattaccgtaatagccgacctgtgatccgggatgactcagctcccctccgattcgccatgaataatataaatcagataagacgctcagtctcggcggtctttcttgataatccatgtggttcggtatctttcttcttcggatcacctcactttcactggtaaagtaaattcagggcgagtctccacttcgtcataaatcccgatgggccgatatgtgtcagccgtggtattaaatacttcttctcttcccccctccatcttcttctcgtatccaccttaaacttcccatctttctctcttccaaatactcaattcaatactcaaaatgtctactaagggtttcaactctggcgacgccttcccccaggacgtggtgttctcgtgagttattgagttaccgccaattcgcgtcccttcaactaacagaccataacagttacatcccctggactgaggaggctggcgagatcacctcttgcggtatccccatcaactactacgcctccaaggagtgggctgacaagaaggtcatcctcttcgctcttcccggtatgtgaccgctctttcgaaatttttcaaatccccctctctctgccgtctgcaaggttctcacgctgaccgccactccgctctataggtgctttcactcccgtctgctccgccaaccacgttcccgagtacatccagaagctccctgagctgcgcgccaagggtgtcgaccaggtcgccgtcctcgcctacaacgatgcctacgtcatgagcgcctggggcaaggccaacggtgttaccggagatgacattgtatgtgatccatcactccaatttctaccaattcccccccaagataaatcgtggactcaattgactgactcgtgtctttttttctttagctcttcctctccgaccccgacgccaagttctccaagagcatcggctgggctgacgaggagggtcgcacctaccgctacgtgatcatcatcgaccacggcaaggtcacctacgccgccaaggaggccgccaagaacactcttgagctctccagcgccgatgctgtcctcaagcagctgtaaattcactcctctgaaaatagatttgggtaaatgggctggcgcattgtttcatgggtgattggggactcagactgcgacatttgtgtcttgcgaatatccaatactgtttctccctgctttctgcggtttttccgaatttttagatcgccctgttgcttgttctgttgcctgaagagtgaaatacatttaatgaagccacgagttcattctttctattctttgttctcttcatctgagtagacgacagtgtccttgaaggtagaaacagggtataatctaggaactatacctggctattttgattggtgcgctgctttgatattgcactagtgctgaaggccagtgccaccgtcgtccgtgctcaaggcctcggagatctagatcatccgtcaattgccaagcatccaaacttcatagtataggcctcgtatcggaagtggggattatcaacctctctatactaaagattgtactacgtagaggatgaatgtatatggatagtgtcaaccgttgaatttcttggatcagattgtccgatcaagttgttaaccttggaatagtgcaaactccttcccagtaagcaatggatatccgcaaaataataaacaccattcaacgccaacgtcggaaaatcaagaattcctcaaattcgatgccagggtgacagacttattcttcttccgatcttctttcgtccgcaagccacgactcagcccaccgccgagaccacgcgcaagagatgcaaacggcgacgaatcctgccacacatccagatcatgatcaatttggccaacgtccttggggccgggttcctcttttcgggtgggagtcaagacaacaggctcagattgtcgacgttgagagtgtttcgcccgtacaaggctgtgctgcgtgatgggtgcgtacttggaaccaggggatggtggttccaacaaaggcatggggacatcaacggcaatgtgctcagagcattggcagccgcatcctgttggacaggttggaaggaacttgttctggtctgcgtggtcgagtgtgctgccaaatttgtcggccggtcgaaggaaccagagccgatggcagtcgaaacaactcacatgtccacagctcagacaggggatcagcataccgctgaccacctcgccgcagatgacgcaaggtagtttggttggcagtggctgtcggggcttgcagttagcgcatcggcggcctgatggtttgtgctggtgccgcttggagggggtattcggggctaggggttctttattgaagatggagagctgcaacgcgtggccgcagctggcgcaatgacgctggaagtcaagagctggggagtctgactccgggtgtgggtctttcaacgcgctctctttggagctgttactgttccagtaatggctcgaggtcaggtcgtccactcgatcagccacagctccaatctttatcacctcgctttgttgaacggggaggtcccaaatcgacaatagattggcataagcaacgcggtatgacctatacaaaaactcctcatctttgtcaagaagagactcttgcgctggtccatcgccttcgaatgcactttgattcttgtatgtgaccttaaatcttgccggtggtgtaggttcgggtgcgtgatcgctttcagtgtcggattgagcttgcgactagagagcaatggaggtcagacagatcagactttgtggccatctggaactaagattagagctactcaccacttgtcctgttgctacacctgggctgttttgaggagtcggctttttcttgtccaacctacttgtcggtggtgacgcagatgacggtccgaatgtaaatgaacgagatagggaggatgccaacaccgatccaaacccagatccacttcgtgtctggaattgctggtcaggcgacgcagccatggagacattttggctcggagtctttcgatcagcagcaatgcctcgcgggcgagacatgaatggaggcgtagtgcctgtagaatatgggggagtggaatcgagacgccagatctcgctagacgagcgtgctgatggctgtggcgcgggcatagcctggacctctttgggaacagatgaagccggcgtcgcaactggtggcttggtaggaattgctgacgagacaggggagaaatccgatgggaaaacaggcttccccggtgtctttttggcttgctggctctctaaataaccctcttggttggcttccagcagtacacatgagagcattgccaccatttgcaaatcaccaatgcgctcaaagtgttcgaagagagctgggataagccaatgactgccaagtgggtggtcgccccaacgaataatactgcccgttaagtctctataaagtccatctctccccagaccgccaattccgctgccttttctctgtatacgcctttgcaaaggccctgactcaggcaaagtgccagggtttttccggacatgcaatatcaacttgatcagaccccagatttgggccaattcgtagcagccagcgtcaagggcaacagccgcgttatgggcacatacatctgttcctttgccacaaatgcgatattgactcgccaactcccgcttgactggtaacatatcgctcaggtcatgaatagatacgatattatggggtgcctcagatttcactgtagctccacctccagtcgatcgctgagaattgtctgttgatcggggccggtggatgccatagctgccggcactgcgccatgtctggggtgctgggaaacgtgtcggtagcccagaaagaacgtcagaggagcctgaagagctcgatgtgtctgagtacgagtcgtctgaatcgtccgaagcaccgtcatctgtgcttgttatcgttcccattccgcgtggaccgggtgagttggtatgtaaccggccgaagccttcaaaaactttatcgcctctagaccagcgagtcatctctttgaagcccatgttctcaaacaactcggctgatctatccttcttttgtttcggtgggaagaagcatatgaggcggccgtcatttgcccaaagcgccccgcatgctttggccacaggcaccatgacgttggcattgacagggcgaagtagctcagaactcatccccagctcttggctctgagtcatgccaacttcatcctcgtcgctggattcaccttccagttcaccattgataggggacttgagggtatcaccagtttcgcccaatatccacgcgatgctgtcctccaggctgctttcacctaaaagataacgcacagcaccttccaggcaccctcgatttcgggacatataggtttcagcaattgtgcgcagttcagcagtggtcttcgcagcccactcatctgtgacggctgcggtcttttggaatgcaaaggtcgggatagcagtcttgggatagctcattggaaacttgatatcaactttcaagaacaaggaggccccgtcagcaccccagggcccgttgagagatatggaaatctttctttgtcgcacatcaactgaatcaaatgccaccttagtaaacttttcaccgacctggctgatctcatctcctaatgtctcaatgtcccagccggagatcttcacaccgcgcatccaagcaattggatttgtgtcggctcttaaatttgacctcggttgcatgccaactcgatcaacatggcctcccttaatccaaccccgagcgtgaggaacggtgatggcgttcattccagtacctgttgcagtattttggttctgatgcccaacagaggaagccacgtcgacgtcatcaagatccaaatctgaattcacatcacggaaactccgatatacggcaccaagccgtgtcacagttcgtgtggaaataaaggactttcccttttcgtacccgacacgcgccagaatctcagggtcaactttgtgcagacgaagctccctgtctgctccccacgtaacaagttgatattcgcgatggtcaattccatccgctacccctccgcgtggtctccacaagaactctttgacttgtcccttatgtccaggaaaagtatgtaccaaaggcaagtcgtcctctggatttgaaccctctccggctcgccggctgtaaaggtgaagatcattgttgcctctctgcggcattgcgagcataccccatccaaacggtgtattgcgtgcacgccacacggggaatggtgtgtgaatctgcttctctggaacatctgaatcggtggtgtagtcccagaacttgatggtcctatctaaggaacaagtaactagagcaccgcgccgaacacgattccagtcaactccatatatcttggtattatgtgcttcaatcgatttgattgggtatgcgcccatgcggtcgtcccaaatccgaaggaaccggtcatgagagcttgcaatgacatgagggtcttgtcgattccatttcacctgggtggcaccagtaaaccaatccgagaatgagactgctggccgcgacggagcacgtaaatcccagcagtgaacaaagctgtccaccgaacaggtcgctaggacatctggatggaaagccgaaaaatttatatccgtaattgctcgagaatgggcgtgaagcacaatttcaatggagttctgccatgtcttcatggccaagttccagaccaacgctttctgattggatgtactgacaacccactgatcgcgtgcagcgaatggcgaccactggacatcagctacctcccatggtgtgtgatgggggaggtatcgcggcggagaatatggcgagtccaggtcgatgacatgtagaccctccttggacgctaaaacgacatcgcgtccacagggggatattgacatggaacccaccggttgctctacatgaaaggagctgtcttcttcaaacgtcggactctccatagccgaggtgagaggcctcggttccatggagctagacatggtgactgcggttgccgctctgtttaatctccggtgttcgtcgggccgcgatcttgcatgaaccggggagtcagaggtctaaacatgcatataacgcaagaccatatgtatttgggagtgatgtacttgttcccattttccacaatggcatttgctatccttttttcatggttggagatgacttatatcttccacttgtcgcgaagaccgcacatgtggagagttgggttgcgataacacgataaggacaagggcgtggctggtgctgtggctgtcagggtgaagattatgacatcacatgatctcgtatacgggacgcgaaataaccccgccatgcaggagcccctcggccggttacatcgagatcgggatctgtttttttagttgacttgcggtttactttcctctgttgacttttccaattacatcttgtggttgcacgcaacgttgaaagcgtgcgagtttctgagtctcctttcgcaacagtctcgtcatctgaaattactaaaccaggcctactacacgcgtgtcgataagccggttcgccatggctttacccaagagaatcattaaggagacggaacgtctgatggcagagccgtaagcagctgatctctcccagtaacttgcatagcagctaacatgttgtgcttgggttacagtgtaccaggcattaatgctgtgccccatgacgacaacctccgctattttgacgtctcaattcacggacctgcgcaatctccatatgagggtatgccggcagtgacaaaacctcgtgccaattgaagtactaatattctttttacaggtggtatcttccgacttgaactcttcctgccagacgactatcctatgaccccacccaaaatccgcttcctgaccaagatctatcaccccaacatcgatcgtctaggtcgcatctgtttggatgtcttgaagagtaagacacaatcggattagttctcaaactgccaatatttaaccatgttttcagataattggtctcccgcgctccagatccgtacgattctactctcgattcaagcactacttggagccccgaatcccgatgacccgctcgccaacgatgttgctcagagatggaaggacgatgagcctgctgcgatccaaacggcaaaggagtggactcggacacatgctatgacctaagtccgttggtgttatgtgaccatgaagtgcaggacaaccctttctatttgcgatagcaggcattgaattccaagcgtttgttattgggcaaccttgttgctttgagtaggattacattctctgctccttacattacccttgtctcaatttattttggctttctctagaaagcgttgcagagagccaacctcgtccggcgtgtttaactgacatcagtcattcttaacaacacatccgctatcgctatcatacgtctgatgtagtccagccacttacaatccccacagtgtactgaacgttgcacggttgtgatactcacttcgagaattgtatatatatatatgtgtgtgtgtgtgtcaacttttctgttcctaatttccgattctgatagaaacggccgttgaagaagagatgtactccaaccgtgtaggcgtaggctgagtacacatacttgtatatgagaatcgtgcttgagccgcgctacgacgaaaagcttccacctgcatctgcagtccagattcaaaggaaattcgacttcatttgactgccagaggtggttcgttagcgtgttccttgtggtctaccatgggcttggcagtgaaaagaaaaaaggtgaagttcatgtcatttgatgtactttcgacttgcgcgcatatcaatatataactcgaagcagagcccaagtaataaaattcaagatatgcaattatcctgctcaaagaccacaaacaatcgaagtattggaagagaaagacatatcatgtgaccttatcgataagtcaacccggaaagggcagaggtggtcacgtgtcgcactttagcgagcgcccgcaccacaattgggtcagtagcatcaccgcgatccacgatttacgacaaccactcaacgccaaccgacccccgtcagcgcatctccatccgtcaagatgcgtacttacgacgacgccttcagcggccagaagatctaccctggcaaggtgcgtttgcaattcccgtcgtcgctctgggaggaatttgtgtgcgagggaacaacggcatcacggattcgacattcgcacttcgatatttcaataccgtcacaattgtcgctctctgtcttagccgaaccgccgcacatggatttcgccgcctttttattgctactggaagctaatctttgatgttcaatctttagggcaagctgttcgtccgtggcgacagcaagatcttccgcttccagcgtggaaagtccgagtcccttttccttcagcgcaagaacccccgccgcatcgcatggaccgttctcttccgtcgtcagcaccgcaagggtatctctgaggtcggtcacccttccccttggatgattgttagattgtgtggggggacaaaaggccggatcgaatggtgacgcccaaaccatgagacggagcaagaggagggattaccatgtcaccaccatgattcggatcaaatgatggaaaatgcgactgcagattactgaccgggttatctttttggatatataggaggtcgccaagaagcgcacccgccgtgttgtcaagaaccagcgtgccatcgttggtgcttccctcgatgtgatcaaggagcgccgctcccagcgccccgaggcccgtgaggctgctcgcaagcaggccatcaaggacgccaaggagaagaaggctgcttccgccagcgccaagaaggctgagaaggccaagatcgccgcctccaagggcggtgcccagcgcatccagagcaagcagggtgctaagggctctgctcccaaggtcgccgccaagtcccgctaaatttctttataaattagttgggaatggaggtgttcggaacggagcagcgctgtgacggttgcgatatgatggaacttacgggcaccggagctggagtactgtctgtgaggactggccttgggccttgaccttgtttctggaaatactttatgcaatacaatttcatgcagaaaaatgggaacaaaggaatcaaaaaatgaatccccatgcgagtattaaaactatgatttcatccaacctccagcaatggaacgattcttgctttttcctcgagataccatatctaccagccctactcatgagtggttgggtaggtatctctgtcggatcttgtcaacgaagtagtccagatccggcctcccgatctacaattgaatctcatgctttgttttgttctgatctgacattagatagatgaaaaatagccacttgtgtacacctcttcctagcatctctagagtggctggaatgaatctaagttgttaaaccggacctttccattcttgagcagacgatgatcttccaagttgaatatctgacccgtataactaccacgtgaaaatccggcataagggttaggtcagctatagtcacctgaaatgccgtgaccttgttaccgttatattagcggctaaatagctagtcacataactagctagccagcctctagttactcatatttatatccaaccagctactccgtacaggtagagaaaatcatcttccttattgattccaacacatcctatagtgtaacagacatgcacagttttcatatctaggtctccatcgccgcaatgcattggtttcaactctcaagaaagcaaagacaatacagacaacatcaatagtgttacaagttaagacggggatcaccgcaatggcagaagcgccgtcatcatgataatggttggtataccaagcactccccagcccggggactttcagtgcgcaattcagtcgccagtagtggagggcaggttcaaaatgctaaaaatgccccaatttctccttgccatgtgccgagggccatgctaatcacgatggattagtgtgtcatgtgcagctccgttctctcaatgcaacgatcgcgtggcttgcgcaagttcctctcgtacgagcctcgccggaccaactgacccaaatgatccaagcgccatacaaaacaaccggcgtcaaccggctttaaaccaaaatacatggattaagaaacgctcagtaataatgtgccatctcgaggccagctcgcttgaagccacacttgacatagaaaccctcattgacttcggagcagtcaagaatgctctgtaaacgagtcagcaatgaacagtgatacagagctagaaccatagacataaggaatagttaagaaggcataccttgtagcagccaacctgcgcagcaacataatccaaagcctggataattctcaagcccagcttcttgccttgctgattcttctcaacagcaatgtcttcaatgtgtccgaccataccgagcgaatgaatgaacttgcgctcaacaatgagactgccggttccgacaactcggtccgcaccatcacagaccacgagcatgtagtactcatcattgcgcgaggtgatccaatcgtaccgttggttccacgcctcttcggtgatatcgccaacagttgtcagcacgcgcaaaacgtccaggtagccacggtggtagtccgagcggcgcatgggccggattgtgtagtctgttggcaggagggagagcacttcaggggagatgagggtggagggaaagagggggccgtcggagacggtctcaattgcgtcgtccactggtgtgacggttgagttcatggttggcttgacggcttcggggattgtggtgcttggaagggcgtgtgcggtcatctttactgggagacttggagggtgggagtgttgaagagattgagggttgagggcgggttgtttttatcaggggcggggggtcgcaaggtagatcggccttggggttgagtaagttggtttgtttaggcggactttgatatgtaattgaggagagatacaagagcgtgtgaaaaagaagaggttttcaagcttttgagaaacaagtactccgtacttgactttgaaagggtcaggtaccctgcatgtgagacaccgccactaagggggtgttttctattaatacattaatactctaccactagtggactcttgttttgtctctttaggttttctctttttttagtataatctgcttatttctgctttaaataatgcgacgactatggaatgtactccgtacatatgtgcatactaatgtattaaaataatcgcggcaagtccgattcactagagttctcgatcggctttgcgatcgaagatgctatttttaactccaaaagaagttcggatctacatacaaaaactatatatcatcccaacgcaagctgattaaacatataattctttcgttgtacacatgctattggaaatagtctataatatcacaggacagcattgctgttcatttacttcaactccttgggagccagcatcagctcggggcggacatactggtcgaactcctccgaggtgagagccttgagctccatagcgctctccttcagagtaaggttcttcttgtgagcgttcttagccaccttagaggccatgtcgtaaccaatgacagggttcaggcaagtcacgagcatcagactatcatacagttagaatttgccatcaaaagtaagggggggattaagcgcatacctctcgttgagaagggagttaatccgtccctcgttagcctccagaccctccaccaggtgggaacggaaactgttcatgccatcagagagaatgcgcacgctgtgaagcaggttggagatcatcacgggcttaaagacgttaagctcgaactggccgttcatgccaccgatggtggcagcgacgtgattacccataacctgggagcagaccatggtgagggactcgcactgggtggggttgacctttccgggcataatagaagagccgggctcgttctcgggcaggctcagctcgcccaggccgcagcgagggccggaacccaggtagcgcacatcctgggcaatcttgaagagggaggcggccagggtgttgagggagccggaggcctcgataatagaatcgtgggcagccagaacctcgaacttgttgggggcggtcttgaactcggtgccggtcagcttggtgatctcagcagcgacggcctcgtcgaagcccttgaaggtgttgagaccagtgccgacagcggtaccaccctgagccaagtagcgcaggtggggaagagtggcctggacacgctcgatgttacggtcgagctgggcgacgtagccagagaactcctggccaagagtaaggggagtggcgtcctgcaagtgggtgcggccgatcttgataatgtgctcgaacttgtcgaccttcacctggagggcgtcgcggagggccttgagcgaaggcagaagagactgctcgatctcgacaacggcagcgatgtgcatgacggtggggaaggagtcattggaggaggcggacatgttaacgtggtcgttggggtggacgggcttcttggagcccatggtgccaccgaggatctcaatagcacggttggagataacctcgttggagttcatgttggactgggtgccggaaccggtctgccagacgaccaaagggaagtggtccagcagcttaccctcagcgacctcagcggcggcctgcttgatagcctcaccaatcttggggtcttacgcaagtcaataaactggcaacatctaattcccacaagagtctcacataccaaggccatacttcatgttcacttcagcagcagcacccttcaggataccgaaggccttaaccaccggggcaggcatgcgatcctgaggctggttgatgtcgaagttgcccagggagctgtatccatcagcgaccttgttcttttgcccattgtaacatatcgatttaatgggggcgtcttaccgctgggtctgcgcaccccagtacttgtctccagggacctattgagaaaaacattagctcggtgcggcaccattgctgcggcattattcacccacctggatttcaccaaaggcatcgctctcagtacgagcgtcaacagactagagaccacaaatcagtttgtctggaattgtttgtctaccgcgcttcgaaactgcataccattctgacggtagttccaaaggctcgcttgttggagaaagtgttcaatgattgaaggcgggggaactgagcgaattgacgggtattagagctcagagaccgggtagcaaagggcgacaaaacgctgcgagctgcgggggtggctctggccgcatgtgtcagggtggccatagagcgcaccgcggctcgggaggaagttggattcattgtatgacaattgggtttgtagctgtaccaaagagggtatgcaaaggctcacaccgagctcctgaagcttctatgggaagtaaaatcgaggattggtctcctttaaagaaaagtcgcaaatttgaactcagctcgactctccgagtccccagccgaaatttcccggtatcggcaggacggaagggagacggcttgttcggcagtgatgctggtaatattgggtaatattcggtaatattcggtaatacctggtttagtactatgaaatttatttgtttacggcttgaacttatcccttgaggctgcccaggtgccgcttcattgtcgcaaccaccttctcgttgtatcgctgacctccctccagaattccatcgagtagagcgaacacatgcggagcacctgcaattcggtctacctctacagataccccagcttcttgaagcttagctgcatacgcctctccttcatcgcgcagcggatccaattccgccgtagacatcaacgcaggggccaagttctggaagttcggtgcgagaatgggtgatatcttccaatcctagaacaaatgagcatcacagtggcaattacttcatgtccaaacttacctcgtcagactctgccggtcgaggaactcctagaaattgttggtggaaatatgccatgcgcgctgctggtagcgctggagcaaactccatctcccggtatgactcgtagggacaaccctcgcggtcaaattcgccttcgggagtgaagacgcggtgcaaatctgtcaccggcacggtcaagacttgcaagcgcagaggaatgttttcatcacgacagagatggctgatgacggccgaaatctgccccccagctgatgcgccgcccactgcgaacctatctgtgtctagactgaactcagctgctttgtgggagcgaatctagaggttactttgtcagcacttggttcacattcgaggtcttcgcccgagaggttcctacccaattgaatgcagtccaacaatcatccaggggaataggatatttattctcgggagctagccggtaatccacatcaaatgcgacaaggtccccgtcaagaccatggacaactcgcttgcagaaatcgtggtcgtaggctagtccaccaaacacccacccaccaccatggaagctgacataggctgctctcctcttcggctgaccctgagcgtcaaactggggcgccggctcaaatattcgtaccgttatttcaccgccatcgacaggacatttctgctctgtgatgcggaatatatcagggccgggagcccggccataggaaatggcataacgggcagggttcttgtggaattcctcaatcgggatctcgtgcgtatgtagtcgcccagcattaaacttattataatattcgacgtagattgggtcataccgagggagcaactccggggggatgctattgtgaagtggctggacaatagctggaacccgaaacttatgcaattcagaattaccggcacctacagtttgagaggccatattggtaacaaaaaaagcacgctgtctgggatataggatggatcgaggtacagaagaggagggggtttggagcagcctatcgaagtccacgtagtacagatcacggggtattatttagatacatacatacctaggtaaatgtaccgacttcggtctatattccctaggcaggtatgcactggatgtcatcagaatatttgttatcacggtacaagctgagtggtagaatccctagttcaagcgcctttgccctccctcatcggctgcaatccaataggtgtcaaaggaccaaaacaatggctcgaaaaaagtccgacaagttatggctagctcaaaacttctccttttagtatgtttggttttgtttcctgttgaagtatatttcctatgtgatcatcttgatataaccggatatagatgaaagcacaccatataatgaaggatgtagtcgtgtgctagacttttacatattaggaaaagtcattgagggtatatatctataaggctagaaataataattggaaccagaagaaaaagattcataaaattttgtagaaagaaagaaataaggatcgaacgtagatgtatatccccgcccactatatatcactgcgcggccgcctcttccgactattttccaacaacacaccacgagctgtcatcaacccctcttgaatggagtgctacacaagaaaatctcacatttatcctcttgagaatacagtgcgtttataatttgtgtcagcagtcctccgatgacattccatgctgatgtttaaagtttagtcctccaagatgaggtcaataacgtatctcaaaggccgtccatcaactagcacatggccaaaaccagaaggctattgacggctatctcttcctttgaatcaaacgaggatgaaggtattgcaagttgcaagcacccgtggaccccggaatccgctactaagcgggacttcccgcggggcaaaaaaaggacggcgatatcgggttgactcagcggacgattcccaaagttttgatctttacttccaaggttacttatactcgccgcggcctcgccacattttgcctgaaattgatcccaggaaccccaattgcagcgtgtatacatcacaatgagcaaaatcgacacccgtcttaatgtctccccagtgcctccggatgagatcttcgccttgaacggagcctacgcagtcgatccccacccgcagaaagttagcttgggcgtgggtgtctaccggacagatgatggaaagccatggccccttcccgtcgtgcaaaaggccgagaaggagctggtggtagacgacgacctcttccgccatgaatacactgcgatcgagggcgatgtgcctttcctaggaattgcgcgggatctgatgttcggattcgagggcaagcagggcgaagaagaggccaaggcacgcattggttccgtgcagaccgtcgccggcaccggtgccaaccatcttggcgccctgttccttgctcaccacatgaagccccccaccgtctggctgtccaacccatcctgggccaaccaccagaccatttgggagctggccggagtgccccgcaagacatacccgtactaccatgctgcaacccggtccttcgacttcgagggcatgatgtcctccctcgagtccgaggcccaggagggcgatgttgtgctgctgcatgcctgcgcgcacaacccaaccggcctggatcccaacaaggagcagtgggttgccatcgctgatctttgcgagcgcaagaagctcttccccttctttgactcagcctaccagggcttcgcctcgggctccgttgaggaggacgcttgggccgtccgctacttcttcaacaacaagccggacatggagatgtgtgtggcacagagcttctccaagaacttcggcctgtacggccagcgcgttggtgcgttccactactgtaccaaccgcgcctcaaccaccctgcgcgacgtcgtcgtgaacaacctatgccacctgatccgcggcgagttctccatgggcccgcgtgttggctgcagcatcgtcaagaaggttcttaccagcgaggagcttactgccgactggcaccaggacttgcaggtcatgagctcgcgcatcaagaccatgcgtaaggctctgtacaatgagctggtccgtctgcagacccccggcacttgggagcacatcatccagcaggtaagcgatctggattttgccatacatgtagcttgctctttactaattctttttttagaacggcatgttctcttacactggccttagccccaagcaagtctacgccttgaaggacaaataccacatttacctgcttaagtcaggccgagcatctatcagcggctgtaaggactccctaatcatagattctcgtaaacataagctgacattgcgcacagtgagccaaaagaacgtcgcctatgtcgcacaggcgattgacgatgtcattcgcaacgagaactagattcgagacgagtccgaactggattcgttttggattttcattttgtttagtctgcctcgatatgcattctagtctcaaaaggggctgaaaaactttttcttttctggttgactactgacttcaaatctttgcatctggcgggcccatctatttacgacgtttcatgagatagaattccaattaagagaaccatagccacatgtgcagtttggtgttcttacctacaatgtaatcatctggattccagacatatacctaggtaaaccggaacaatcgagtcaatgagcaaggctgcattaggaaaattgggtactgtacatataacagtaaacggaacatgagaaaggaaaaagaggaatcaaagtcggagcacgttcgtaagaatcctatggtttgtccgcttaagtgaagagacacgccactaaccacaacaaggtaaaactgtactgataaagtcgtagacgctggtcgacaatggggacaaaagcagggtagggatgtcaagagattgaccgcgaagcacgggcagagcagaatatgttatcagagggccattcagagaggcacttcgttgaagtcaccctcaccctctttgcctttgccctttgggcctccgatggttgtcgactcggagtcatcctcgggcctgttctgtggaagggtttgctctttctctgtatctccattgctctcctctgcagcttcggcttcaggctcctcgttcttcgcctccggagaaggtgccgcttctgcctcaccgttctgcacaggctcatttgtatcttcggcttcatctttgggcgggggcggagggggtgggtggtcatctgacccatcttgtgatccaacctcttgtgtctgggtctgggtctggggttggctactcgtctctcccccagggaatggagtcagaggaggctcctcgggcacctgttcttgcgcagggctccgttggggctgagtgctgagccttccctggttggcgcttgtcgcggttgaaagagtagaagtagtacgctgatgggacgagccgtggatcacgccgagttgacgtgccttggggtctgcgttgagatagtagccacgcacaccggcaatggtcccctctgtctcgcaagcatccacccactccggcaccacgacagggatgttcatctccacagccttctcccactgcgcaccccgtccttccgtgcagacgaagtgagtagtatcgatacggaccgagtcgatcatcttgcctccaatgcgatccaatgcagcaccgagagcctctttctgctgtggatcgagaatgcccgttgtgacggtgataccagacagatcggtcatcttgtgtgtgcgacacgtcagcttctccgactggtaggtgcctgccgtagtccgcagaaccagatggaatgagtactcggagtgaatggccagaccgctgatttttgtgctgcgagtctcgagcgggcgtggtatggagccggccttcgagccattgcggtagagggatagcgatttcagggatgcagtggctaggtcgattgggtcccactcgagaacgagcgacgtctgggttgcatttcgcaggcgcagaacgggtggcgacggggccttgacaccgtaggtatttaaaatccgcttctggagggattggaaggcagatgcgctcgctgcttcggcggcatggttgcgcgaaacggtgatatcgacaatgctgcctgagctaatgttgttcggaaggaggactgaggggaattcaatctgcgcggaaaattgtcagtaaagcgtacttgtttgctattgatgttctgcagaaattcaagtcgtcgatgtctggggagtagggagcaggcgaccaggggtttgagcttacgagtcgattgtcttgggtgaggagcacggcaacacccgcgtctaccttgccaactgtcaaggaaactaacatagcgaggatgaaagagggggaagtttagggtaagtggtggtggttgtcaagtgagtctttagcctagaccttcgggtcgttgattccgccagatcggcatttagcgagataccgggaagctaagatactcgggcttctatatttacttctgcagcccagagccaacaataaatcatttccaaaactggagggtataatgaacagaaggaacaaaagttgatataatttgaatctcagatgcaaaccaatttcctctaaacgccataatcgcaaggtctcccagataatgtacagcaacagtccaccagtcgactgctacatgtattatacaaggtgttctggtaatgctaatatacattgaatctcgcggggtcgcatgatgtttgtgacttgtccgcgattcgccatttcgagtgtggctcatcgacaataggtcatttccgtgctgattcatgatccagaagcaaggatattaaatgatgtacatccttctggactacctcgaagtcctgtgtcacacatggcggctgaatgtagatgtccatggttcctgataattttttgctccgcgaaggggactcagaaacgagcggtttccccagcttatccaatccttgctgcctcaaagcctgctcaacagcaattcgcactctgcgcgcgcaccaggagcgaaccacccgcttgctttgctggagctgtgtcaccgaaacccgccaccataatgtatttctttcacgatgtccacagagatcgacaattttgggccggagcggatgggtaggagaattcaaatagcgggcggcaactggaggggtgttgcatttcggccaataccgaagcaccaagctttttgtagacgtggtaaatttcactgccatggtaaaagaggtctatcggtggtcgtaagggtatgctggtttgggctgtgaattataaggagggtcgtaggacattgatatcatgtcgggttggacaccacgatgtttagtaaacagagccggaactggcgaaggtttacggacacctcaaaggggcaattggaggttcgcaatatatatccaaagagatatcatcgagccagcaaggatagtataacggattattgtgaatgtactcgggaggcgctgaatctttggagattgcgtcgataaagcagtcgcgttgcttatttgttaggacacgccgcacagagggcaagacagctgtaattgaaacggatcctcaggctcttgtcagacctgacaataccttgtatcgcaaagcctcagacttttcctcagaaatgcccttgcaaacttccaaacttgacatccatggattgtttctttctcgcctcatctttttctgccaatcaaatcaggcggtcaaattttaccccgaaaccaggcatcaaggcagaaatatgccgtaagcgggggcgaaacgctgtgacgccactgggcagcgagtgcctgattacataataagcaagatttgaataccagtgcgcagaaaccccacctccttctttcttcaactctcacttccctaatcaactttcgattaggcctcttcagatcttcgttgatctaaggaaaaaatctacaccagagagacttgacctaggtgaaaaggtcacgacaaccgtcatgcccaagaacaagggaaaggtaagcttgcaaaatatcccccctcctggtgataatttcttcgccacatccaccgtcgtccgctcaagggtagccacctacccctcgagctggtgactttttggactcgtgggagaagtttttatctttttatttttcgaaagcaacattactttatgggacatattctaacaatcaaatatagggcggtaagaaccgtcgtcgcggcaagaacgagaacgacaatgagaagcgtgaacttgtcttcaaggaggagggccaggagtacgctcaggtcgtgaagatgctgggcaacggtcgtctagaggcactctgcttcgacggcgagaagcgtcttgcccacatccgtggcaagctccgcaagaaggtctggatcaaccagggtgatatcattctcctctcgctccgtgactaccaggacgagaaaggtgatgttatcatgaagtacaccgccgacgaggcccgttctctgaaggcctacggcgagctgcccgagcacgctaagatcaacgagaccgatacctatggcggtgaaggcttggacgacaacgtcgaattcgacgaggatcgcgaaagcgaagacgagaaggatatcgatgtcgacgagctctaagctcatcccctgctactcccagagttcgatgctctgccctgcaagaataccgtggatacatcccctctcagtattctccatgttcgccaaatccctctcctcctactcgccgcctttggcacagtgccgtcgctcatgctccgaaactgcctttgactacttgccacgcgaggcaatttcgacatccgattccctctgtacatccgtttgaatgggaccaagagcatcactcacctccccagcatacgacgctgctcctcacctcggcttgcatgaggatagggacacccctccattctggcgctactgcgacaacttttacgggcctaaagccatcgaacagaggaccctcggtgtttgtccattggcgattttggattctccaaggtggatcgatcctcgataccattttcgtcctttttgcaaatatcttgggatcatgacagagactaaaatgattgctatgcacacatcatgaacctgtgtgcttgttttcctgcattgcatgcggtgtgtttactctgctcagcctcgacttgcttttctttccgttcttttatgatagagtcatgaaatgggccacgagaattgaaaatatcatttttagaagacataccttcttttgtagaccaattcaaaacagtaatcagacaaatgaaccttgggaagtgaatatctcgtaaccaagctccagccacctgcgcaattccagcccatgatgttgtgtacaagtcaggtatatcttggatgtgttcacgtacaatttcaatctaattactatgtacatgtattctatgtatccatgtctttctgctgaaatatcaatcagatcaagaatccaaactacccttccccttagtcgatccctctacacactgcccacctccaaacatagccttcgccgcagcctgccaaacggtctccctttccaaataattatccagcgtatagaacaggcgacattcagcagcttcataaacaaactgtagcggtgtttggtcatcctccgggtcatactcattccgcaaattcaggttgccactccactgaagcgacgctgttgtgctcgggctggactcattaaatgccttccactcggcagatgtcagtagtggcgctccagtgttggtcgagtctctgatcagaccgttcgcttgctcgatatacccattgatgtagttgatcccgagtgactggccgcccttaacgccaccaacgccctgcatgggtgcctttcgtggacggccgccgaaggtgatagtgcggacaccctggcgtttcatcagcttgacgaagaacgcgcaagttgagacacagtcgccgtctgtgatctgtaattggaacctgtgttagtttgcttttctcttttctgtattctttcctgggacaaacacgtacaatagcgatgttatctgccgggaagggtgatttgcttgggttcaacggaactgggccgtagccgttgatggggaagttttttgatgaggtggaggtgtagttgaagttggctaggaggctagaagcagagctcccaaggatttcatgtggcccatagagatcttcccacgagctgaagccggttctctggtcgggccgaaccatctgccgatatgcaaagacattgcttgtgtccgtgctgccgtcacgcgagtatgccttagtgaggtattcggctgcatcgtgtgctcggaaccgcgtggctgtgtatggggcagcgttggggaagaaaatacgagacaggtcgatgccaatagacatgtatccaccggggttggatgacaggtcaatcaagacgttcttctttccagattcggtgctgttttgcaagaagtcgaccgcaatcttagagacctctgatgcgctggatgagaacgtgggcagaaagatgattgctgtgtcctctagccctgataatttggagtaatatccagcaatcgaattagccgagctgcgccaggtagtgctgggaagcccctctatctcagaggaggcttcttcagcgccagataggctgctcgaagctgtagacaagtctcgaggaaggcacgctatttcgtagaggcgcgtgccgtttccataagaaaagaacttttcgctcggtgtagccgttttctggatagtcttctcggtgccattgccaaacttgagggacagctgagcgccatcagtccagtctccaatggaagcccagattccattcacaccagtaggagtgttcgtgacactgcgggctggcgcagggaatactcgattgtatctgtgacagttagtgtgattcaatactgtagttacagaaggatacccactgtgcatcacgatcctggaggttctgatcactggaatatgattcaaggtatgtggccacgttagtgccgttgatggacaccagaggcgagacggcgtctgggtcgaccttctgcagttttgcatcacctggcatgttagtttgaggttttgatacagatatcgagccaagcatacctagagcgtacacttgaggaagcgcgagcccgtctgttgagattgacaccaggggcatatcgatctgatatgtgaagattgactgcgagcatagctggaaggccaagtgaccatcatgggctgttttgatgaggcggttaatttccaagtccatctcaaattggctggtatagctgttgctcttggccttgcccattatcgtatcgattcccttcatgatatccgtggagggcattgtatacccagtaggcggatctaacgatataagttagacaggttaaaaagttctcgttcaaatcggtatcacttacccttcaaaatatcgatagttgactggaactcgagaatcttacgaacctgaatcaggaaatcaagggcacggtccgagtcaaagggcatagatgacagacactgatgtgccatctcatgaggcacaatggcatttgctgccacagttagccatcaaacaactgacgattctaagcccatgacatactctggtctttattggcatcttccaccaatttgctaacctgagcacatggctcaacatcgcgtatactcccggcagcaccaacaacagccgccaaagcgaccggagtcaacacagtcttgagatgcatggtgataagttggagacgtcaggggcctgccataataattctgacctcgaagggacccattcgcttctccactctttctcaggggtccttgcttcggctgttgactgggggctgttctgtttttagttgatctgcacgatcgtcgccaaggcggaaggaggtcttatgggggtcggggtacggtgtaggccaagttcaaattgattcagagtccgcatgtgcagatgtctcagttgtttgctgctttcatttgtatttgtctgaggatttgggtaaaaacaagagatgtgatgggatcaattgttgatgcacatgtagttgtattcgttacacattaccgcatttgttgacgtacacagcaatttttggtacctaggtactttatttaaattgcaccaaagtcataatttgattaagaatgcactagtgactcaaggctgaattctctattaatcaaatacgcttttctggaagaaagcaactatcttacgtgcagcttctttgccaaccagtggatccagctgctcgacctccatgttggcaatatcactaatattgtcggtttcgatgatcagccgctctagagcctggggtgtaacacctggaacagctcgcaacatgtcttgtggaagaagattgaaggtacggtgctcaatcccagcggcagccatgaggtcggcggagccagacgaattagatatatcaatatcaagacctagctgaactgcgcggagtggatctggttcctgggcgttctttttgagctcagcaaaaatctcagctgtctgataaggggatgaagaccagactatctttaggcgtgggaaggcgagagtgaggagcacaagtagatgctgagcggactttggattagacggattggcaagcgagctgctgcttgtgctggttgcagtgccggaagatgagaagccgtagtctgtcataaacgtgggccctgttggaacggaggcgaacgcatcaaaagtgaaagatttgttttgatcaaactcgatcaatagtaatgggctcttgtaatactggagcatggtctcagcctggttgtaaaggcggccattcttgagagagcttatgagatcacggatcgatttcctttcgacacaaatgtctggagtgagaatgtagtcacccacggtgagctggcagggaatcacaatcatgttgttcccatgtaagagagatggcagggcgcttcggaactcccggacatcaactacaacccgaggaggggatgctgtagctgccagtcgtcctcctccagcaatacgagtattgactgtccggaggaattgctcctgggggtcttcggcctttttgtcgtgcgtcaaggtgactgccatgttctgaaaatcgagttagctagcaattcgaagtgctgtagctgggtggcttacccccttctctttgatcagctttgtgaatgagtctttctctcgtcggacagcactcagataccgttgttcctcaacagagccaccataatacatgaagtagaccttcacgtttcgccctgaatgagaactgcgatatacctcgacccttcgaatgaatgcgggatcgggttcgtacatgataatataccgtgggcgcacttcctcgagtatatgctcatccatgtcaccgtcgtaggggtgtatcatgactagatcgttcatatcatataattcgtagaaatcttccatatcctccagttcatcgagaataacctcctctttctgcgtttcttccaccttagtgggctgaatctcacttagcaagccgacgacctgacctggcaattcgacttcggtttggacactgctacttggcacacgacctgcagccgaggtgactgcgccgccgccacgtactcgacggcgtttgtttggaggaggccttccttgatgcgcactctgggcggctggtgactcagaaggttttccagacctgtcgtcctctcctgactgggacagatttttgttgacatttgaaagagacctcttccaatcgaggtactctcgcagccgacggcgcatcattagctccgcagagggcttgtcatcgctcggatcatcatcttcggattcggacgcttgagcaattttggcatgcatggtgccaatgtactcgcgaagctggcggcatactcgttgatcactacacataatcaatatggtactattcgattgatccattcgcacaggatggaggtaagcgtcgtgttcgatttctgcaaggacctctgataagacactccactttgggagttcctctagagctgggttcaactcagaggaaaatgtagtcgaagatgaaagccgggtcaattcgttgttcaatttgccttcgtagactcgcgatttggccgtctggaaaagaacgtgggcagcatcaaggaaaagccacggtgagtaactatgcctgctggagccgggaggcggagcgttcgcagacacgatagtgtcaaggtacttaacaaaagataccgcatcgtaactgagtaaagcactgcagaactgtcagtatagataaatggaaagacacatgggagacacactgaaggattgctcgtaggtctgtcaggtcgctaacgatttgtcttgtcctaaagctcacacggtgccagattgggtcaagttgacgtctgataatcatatcaaagttcctgtgcaaagcactgtccaatgtccactcttccatatccaacccggtgttgctcttcctaagctcagtgatactgatctctacacattccagaacagcattttgaatttccctcattttgtcgctcatgggaacttccaattcaatcacttctgccttgcggtttccttctagggactcagcaacagaaacgtggaacctaggccacagtgaggccttgcgtaggaaaaggttccgcagcatattagccaacggggaaaagcccgtagtaaatggctccggagagtcggagaatgctttcaagaagccacgcttgttcgattgccggtatacccggacaataaatgcttcgagggacgtcgccaagaccttatcggcatgcaaaatgaccatcccagtgactttctcgggatcaagaagttctagaaagatcagcgagtgtcttgagcctcttatactagacatgcatactcgataataagtccacaaccaatattctggatgtcacactcagaatacccccttcgccgtacatcctctctctgggaatttcgtcaatacgtcgcaatcgacatggcagaacaagaaacccaccgcaacggcaccgtagctttctcggtattgatcacttttaaccccctagcaagaggggacttgctggtagcgtaatgctccgccaatgctggtttttagagtccatcagcttccaacaccggcgcccgacttgggatgtaaaccaatccacataccctctccgatccattcattctcacgttggtctgcacccaccaccaggaccagattgtttcccgccgcatcataaaaatggaggaggttcgatattaggtgtagaagcccgaggcctcgtgcaaggatgactagctcatcttcggcgcgtagttcggtaaagagctcctgctggtattgcttactgagggttagcggtaagcctgcgccggggtaatagggtacttaccagtggtagggacaacttcaccggcacactagaccgttctggaggcattgggatcacttcctaacgcgttgagcagtgaagggtacggtcggcgagatgtcgcgcgatcacgtgtgctatgatgtatgacgtaatggatgggtgttggagaatacgcagcctaagaaaggagctgaatcccaaatggtgtatttattctatttccagtattgtttgtttaatatctatcaagcggctacctaggtactttccgtatgttggtgatggacctagtttgggccataacccgctataggtatacaagggcaagttgccttgaatggcagaaactggtattaaattaagtacagatagataagcattgttgatcgatgttctctcagttggatggcttgtttagttccttcgcgcgtgcctcgagctcctctttcgaagccttgggaggcatatctacaaagtgtcagtcgcgggcctgtgcagatctagtagccaacttactgtccggaatctggggtccctttgataagaagtctgctgcagtcgctttttggggttgttgcccgggtgtcttctcggcctcgtttcctcccttttggggcgcagatgggaagtccgacgactcggggatgaccggcattttgtagagataggagagtttcttgttgggttgtcactagctaatgtagctctttttcactggtaatagatcaaataaatctggtaattcgttgatggtgagttgaagagacaggtcctgaaggttggtggaatgtctgctttatagatcttgagcgggatgacgtcggtggtcggattgcaacgaatagcatgatatagttgcctaaacacgttcacttcgagaagaaacaagctgcaaatgcaaatgcaatccatttgtatctactccgcacctaggtagctatacgtccttgatctcccctgccaggtgaggctttcctatctaagctgccgccacttttataagggcgctcagaatcagggcttactaagtagatttcagtctaggctggctcttaagctgctaggattagtgtctaataaacgcttagtgcgtgggaatagacaacacaatttatgttggaacgtatcatgagctataactccatggatagcgggtatgctattcaactatagtaatatccaatacaacataactacatagataccaaatgggagttgacacattagaataaaacaacctatattttgattgtgaaggattttatccctgaaaagttcaaattagctaaacttagaactacctgagaggaataatccgccactgatgatgggactctaacacgggctggattgacctcaatacaacaaaccttggaagggattcatgcaggcgttacgatgagatgactaagcgaaacgaagcgactcattcgcctgtcctccccagatgaacagcactgcctcgtatgattgcccatgttccgtggttaacgaaagaaaaaaacaagagatatttgatctgattcctttttcgaggctgcgacatctagttccagccctgtcttttgtctcttcgtgccatagccaacctgtcctacgccagataatatgtttctcttgctcaacagatacaagaagattgcgagggtgccatttagtatgcaactatgccgcaaaaatacgtcttagcctacctacagttcctgcaagctgctggcttgcacgaaggccgaatggaagaaactacggtgccaagcattataatctgcaacacgattatgctagtgctggcctcagctggagtttttgttaagcttctaatgctgggccatcctcgaaatattggcgccgatggtggtacgtggcccataaaaaaaacatctgaatttcagcgctgaagaaacgattaattttcaagccctttgcgttataagttgggtatgtcatctttctacaaaatagatgacctctttggtcttgctgattgtacatatagattttcgccttcgtgttatgctttactcctatgtggagtatcgtctcccatctcacacgtcacgcacttgcaagcccgctctgacacactaacagtgactagatatggatacggcaaacacatcgaagcagttgaagcagacatacctgcgatatctatgtttttgaaggtatgaaaccgttaatagcttcgaaacgttcattagtgcttataaacacgatagcttgtcgtcgtgactgctatttcctatctcattgcgatgactgcgatccaggtttcattttgcctactctataaacgattatttgcagtggcccatgtcggctggccttactggtttctgataaccattgtggtattgcagtttattgaagaactgttcgtatttgtttttcaatgctcgccaatccgaaagcttgtggatgccaccggtttagtgcaagggaggtgtttggatctttacgtcttctacattattcatttcgtcacgaggctggtcacaaatattgcgatcttcacactgccaatcccaaaattactgaaacttcagatgaagcgtggagtaaaggtgggtgttgtcttattttttggacttggtctattgtaagccttaccctgctacaagttctgtatctcaattttgtgccatagactgaccttacacattcctagagtttgtgctaccagcatcatccgagccacttacttgaaacgcttccaagtcgactacacatgtttgttgatactgtccgttatgtcttagagctttttctaacagcttttcatcaggggacctcgtaaacgcactaaattggtcagctgtggaggtctgcactgccatattcatagcctgtattccttcattcaaggctctgattaccgtgtttttccctttactgcgaaagtacatgggattcccaagtgccagcacgcctcatcaacatatcaatgaggagaactctggcgactctcctaccgattatttcaatttacctgtcacccagagagtccaaaccacgcctgactgttttcctctaccctccccggtcgtggattatgacgaacccacgaatttgattatgtccggtgcgatacccactgtgcctgaagatcgtgcctcacgccaggatccgtgtttagattacaatatcggtggcagtgcataaaaaataggttaaagtgatgaatcaatctgattgttaatcatgttgtggaaatttataaaagagcaagtaatactttaacatcattgagcaagccttatactgcaaattttgccgagcagtcactgaccgtatcgcgaaagtacccgcggagtgtctcgatcgacgggttcctcgatttttgagtgggtatcccataatattaaaggggttcggagctgaatcacaatagctttcagcacatgctcttcgagaacagattacaaactgaaaattgtgcttggagacctgtggttggatcaattggtgcctgtgaacatgctctttcgccacatataccatatatagtcttcaaggggacgaacctcatgttactatggtttgatggccttcgaaaacactgggccgttaatcatagtccaagcagatggacatgtggtgggataggcgttagttggctccagaaacacttcattccattacggaaagtcgaaccaaaggaaaatatcgtctcttagatcctgaatggatacgacagccatctcgtaccctcatttgatcaaatttgcgctccgaacaacatcttacctttctttctatatgcctgcgcacacttatacttcctatcctatgtgatctcttgatgctgattgtagatcgctttattgataccttcctcaaattccccaagcctagtggcaatgcaaccaaagagagcataggaaatcaagtacataggtataatttgttggttatgtttactggatacagcggtgccgtgggtgtaaggaacacaattaggggcatgctgtagctacctagtatataatgattcaattcaaattcatggtgtaaccaagatagtagtaatatgaagaattgaaaggcaccagaaatcaaactgctctttatttgaaaggtaaatactacatagcattctaccgcaacaagtatatccatccatctccatccatacatggtcaaaataggtagttacataaagtattaccatgtagtcaaaaccatcctcttaaggtcttcttgacatttttacacctacatatgtacatatgtatttatagaaagccatctgggcatggtcacacaccgcacaatcacctaaatttgtagtgagctcgtctctaagtatgatataaaaattcattgaaataggcatattaaactgcagcccacaatcctcgtcactcatgaacatgtcaacaatattctatcaatttgtattttctggatgtctgttttgagatctgacacatcaaagtatcaaacaaaaagaatcctaaataagtatgtagtgaccgttagccacaccttaaatagtacaagacaagtaccacgtgccggtgctgcggtaggcctaggtcactccggtgtattgcgccccgcctacgccttctcacctccgaacctctccaacactcaaggcaaccgccggtcggctcctctctcacaccctggccttcgaatctaatcaattacaaagaaacctgaccgcccgccactgccgtatcagtcggtgtgttgagggcgctatttcatcattcgaagatacccgcccggctgcaatgtgtgctctacccacgtaaccacccttcgaactatcacctttcccctttctattcagtgggggaccacctcgattcaccatgccctccatactcagtgacgccgacaaggaaactgttaagcggaatgtccccaaacccgctaacaagatcctcgccgtagctgtcgcgcgactttacgtcgcctacccggatggacagaaatggacatataccggaattcaaggggctgctgtcctctgcaatgaccttgttggaaggactttttggcttaagatagtcgatgtctcggtaggcggtccatactggtgttgaagaaaagagtagaagtgctgacaatgcattgttctatgaagcccgctggcaggggcgtgatctgggatcaggagatctatgacaacttcgcttacaaccaggatcgaaccttctttcatacattcgagctcgaagcctgtcccgccggcctgtcctttgtcgacgaaaaggaggccaagaccttcatcaaaaaggtgcatgagcgcgagaaacatgccagcaaagagaccagcaagactcctttcgcatctgctcgaggccagggacctgctcccgttaccaatgggaaagtaggacggtctttgtttggcagcttgttgcatcgttcgagcccagctccaagtgcaccaccgccgacagcacctgcgccttcaatacaggttgctcctccacctccgacgctgtccccaagcgcgccaccggctaagccagatttaccgtttgacacgagtgacccctcttggaaaggactacttgatgagctcaaggggatgggaattaccgaagaccaaatcgccgagaattctgaattcatcaaagcttggattgaccagaagcaggcggcggcgggcgagtctgctcctgctgaagatcagaataagccgaaggcagctcctccaccgccaccctccgcacccccagctccgaaagtgacctcaatcagtcctcaagacacgggttccagctcaacaagcagacggggaccgccgccgccccctccgtcacggaaaacacgttctgaagcaccagaagaaccggtctccctcccccctcgtgagccatctccgcctgcgcgaagattcaatgcgccacctccacttccagatgcaggcaagttcgctgagcctgctggccctgtacccccgcggcgtccacgcgcaacttcgaacgtcaatgctgggcctccgccgcccccgcgaccaccaaagacaccgatggatgatagtcacaatgttcaatcgagtcaatctcgatttggagtaccaccgcctttctctggtgatcgcaaggtgtctgcgccaccggcaccccccagccgtagccctgcaccaggtggccctccccctccgccgcctcgcacagcgagcccagctgcaccacctcaactgccgcccaaagtgccgcccatgagcactacaaccggaccccctccacccgccagaggtcccgtttcacccccacttccacccccaccagcgcctcgacccgtgccagctgcaccgtcttctcctgcagctcctcctccacctccacctagaggaccagtatcgcctccccccgccccgccctcggcacctacgtattctcctagcgtccctccgccgcctccgccgcctggcgctgcagcaccaggtggccccccgccccctccacctccgggccgtggtggcccatcaattcccccccctccccctcctccggcgcctgcttcgcgggcaccaggtggaccaccgccgccacctccaccacctggagcgcctggaggtggtgctcctcctccgcctccacccgctggtggtgctgcaccacccttgccaaaaccctccggagggcgtgacgatctgctagcgtccatccgggcttcgggtggctccgggggcggaggcttgcgcaaggtcaaggatacggaaaagaacgatcgaagtaaagcgatggtacccggtggtgctaatgagtcttcagctacaagccccaatgcaggaggcgccccgcaaggtggtttggccggcgcattgcaagatgctctcaacaagcgaaaacagagagtcagcggaagtggtatgtcaatcccaacacttaaacgcggatccatattctaaccatgttgatagatgatgagaaagacaacgacgacgattggtgaacagttacttttcggtgggattgttcaagtatttcaagataccaatggcctttgcgcattattgcgagcatcgagcattctgtttcttggtccagcattttgcctaaaagtttggcttcaagtgttaacaaaagaggggcaatgcactctgtatatagctttcaatggtagattcagtggattcaagagatagtctcagcacgaggaagtagatgtggtttttttattatctgtcttagtccgatgccggctacatgcatacgcttatgcccaagtggagtttagcttgcacccgtggatcgccaccataaatagcccagggctgggcataactccccgggcatccatagctttcatcattatctccaagaccgtccctctgtcatagtcaccggtttcgagtttcgcctcaaaaatacagctcttaatccgagatgaagcttgatcctccatctcttgggtctttgcccgttgaaattctgtgctcggtcttccgtctcttggaccctcttgggctcatatccatcagccaaacgaactccaaattccgtacagtgattcagccaaaacaaactcatttactggagaggttgcttgaacttgaatgccgagaagaagtcggaggggtcacgcccgtctttcgatcgaaggacaaccacctcgtccctgacttcacgtcaaaagaatggtatgatatgcgctgggcctgtagcacctgtctcaagatgctcccacatacagcattcgacaaccattatattatgcggctgcagtaccgcaagccattgccaggatccccggcagcgaaatcttacacaagctgggagtcaacacgagatgggaaacttcgcagaccgtaccgtatacacaaacaacaatttaattccacggatgaggaccggaaaatacggcgtcgatatggtctcgcatctaggtgcaacacattaagaccgaaccaccctgtgcgcgataggggcgcaagattggccagctttcaagacagcggcatgatcacatttcaaggctttagtctggacgaatactgcagtatcacacaagaggaagagcaggtgcttctggatcatgaagcacgcctcattgagagagaacgttgcggcttcaagcggcatttgcgcaagtgcaacgaatgccgcttcaggcgtggtgagctttcgtctactgtgcagagaggcacagacaaggtcccatagtaccgagccgacgcctgccatttgccagtgccttggaccgatactttccaggtgtttccgccctaataacagtgtgtgcccaaccgcgaatgcatcctgttcaatgcgtgtatcgcaacaacgcttttgattccctctggactatgtatatgatgcgatgcccagtatgttcgcactggcaggaatcgcgtgcgtttcgccttggtgcggctttcaatcactgggcacctaccgccgactctgcctcggagctccaaaactgggacaaaactaaaatcaccggaagtttcattgatggcttgtcctgtaatcgttgttttgctaaagaaaaggggcacgaaaagcttcgtgaagtgctggtgaattggttggactgctgcttggatagcgagcgacagcggctagggtatctgcttttgggtggctgggagacgctgttaagccggtaccgacggcttgaggaggtaagcgacgtcattgaggctagacattttctatttgacattcagcttgttgttgcaaaagttcagaaagaccacgagtatctcagaattgtcctcagtgatatcttgacattatggctgggctttcgtaagtgggttaccgtatgggagaacatggattccgaatatcgaagttacttcaaatacaacccctgtgatgatctgtggttcaataattatgagctgattgggacacacttgatctgggtgattgaatgcaaaagggagataatggaggacaagggtaatgacctggttgactgggcactgagccgagaaggaagtgctttgacctaggcaattagtattagtcggtaccaatacaaaatcactattccaatctcacagtacaaggcatttaagaaacagcgagcggtgttcttatagttctacaacagttccaagcttgtatagttctggtcctcgggtcaacattgttccgggcaacgggaaaaaagcgtatctgatctgatcgggagaacctgcgatacagctcggtcgataatccagagacatgctgtctccgaggctgtctgcaccttctgcctctttattgcgcttcctacgatcacagtctgggttcttaaccgcaccatcagcatgcgcttatccgaagcgtcttgctagtcgcgacaaaagcttctcgacaggaccatccccgaaactctcaagctggacgcgtctcaatgcttcccataacaccgtagcgcttggtacaacactgtgcgacacccactatggaaaatcgaaccccactagagcaacagtgtcctcgcccttggcgcctacgcagctgaaattgtcccgtcatgcatcaaccaaaagccgaccttttctccgacggctgtttgatctcaagcggaacaaggcctccgactacaagcatcaaggtcccgctggccccgggcttatggatgaagggacggagggaatgttcaatattggccgcagcctatcagccaaggcgtcaaatgagctgcgaattcggtgcacggagtttgatatcaatggggacgtcacactcgtgaacggagagttccgaaagcaggagttgattgccaaggttggtaaaaaggactcgagttcgagttcaacgtttgctaaccggtgaatcacgatacagtatggtctccttcctcgagatctacgcaagattgattcgtcaactctccctcatatcctggtgcgacctagcgcaattctcatcaatctcctgcatctgcgagttctcattaaagcggaccgggtactcgtattcgacgcctacggatcgacagactcatacatgcagtcgctgttcatatacgatctggaaggaaagctccgccagagacaatcccaaggtgccgctcagcctagtcaatcgctgtcgtacgagtttcgcgcgctggaagccgttctcattagtgtcacgagtggcctggaggaggagtttaacggagtgagagatcctgtcgtgcgggttctccgtgcactggaggaggacatcgaccgagataagctccggcacctcctgatctactccaagaagctcggtacatttgagcagaaagctcgcctggtacgagacgctattgacgatctgctggaggccgatgacgatttggcagcaatgtacttaactgagaggtcggtcggcaaagagcgagaagagcatgaccatcaagaagtggaaatgcttctggagtcataccacaaagtgtgcgatgagattgttcaggccagtggcaatttggtgacgaatattcgcaatacggaagaagtgtaagtttgatcgctcgttatatgcggaaagcacctctaacacaacttagtgtcaaggctattctcgacgccaaccgcaactcgctcatgctcatggatctcaaattcagcattggaacactcggcctcgcaacaggaacattgttctctgctctctacggcatgaacttgaagaatttcattgaagaatcagacttcggattcggcggtgtctccgtgatctgctttgctctgactggtattgtctgtgtctacggtctcgccaaactgcgcaagcttcaacgggtccgcatgtggggtgagtccggcatgggaggctctacattcgctcccctctccccaaagcgcagcgcactcggtggaaatcgcaacaactggcgtgccgattcgatcgaaccggtctggggcagtctcccaggagaaggccggtctgagcgcataagacgtctcaaagagaacgcggctgcagctgccgctcaagctgcatcgagaaactcaaaatcgacacctgccaattcccaggctgctatgcaggcatcagctacggcctctaacaatgctcgtgcggaaaagggcaacgatcatggcaaagagactgtccgccccgaaggtcgtactaagtccgatgcatgatacgcagtgattgaagtatgtctgacggtttgattgcgttgtaacgggagctcaggcgttttgattccgatcttcaactcccttttgagttgaagaggtctgtaaaatcattgtacattaacacactcctctttctattcccccactctatgttttatatttcgcttagatgtgaatagatctagagaatatctgatgacatatcaatactattcgtctttaattatcattttccttgacaaaggccctccgccctgcttccttggagctaagtagttgcaaccagtataaatgctattcacaggagattatattcatttgggtatccttatttagcttcgtgcactttcccctgttcttggtgaagactcttcgtccgttcaacccagagcctagcagctacctggacgccaccgtctttggagcattcacgctcaaccacttccataattttcttcaaaacagcatctgcttggttctgttccatcggagaatctctaggacctcggttctttatccattcccctgtgacctgctgacgacctccaatcaacgccatgttaatcgcacccggagtgcgtagccatgtcttctcaacattgaacccaatctcctcggcaacacccattgtttttgcggcgagggatccaatcattgaattcagaaacccgctctcggtcttctcttcgatcttgattgcgcgaagtgccttcaagtcaccagacgcaggctgtaggttctgctctatggaatcatcgactttccttgcctcgggatccccgtccagactcttctgcactggaccacgctcctttggcggcggataccgatacgaagaaccagcgagtgaacgagaacagcacgggaccacaaagaatggcaatggcgacgatggacttgatagggcggccagtataggagtccatacggtaagctcatctgcatggtcggatatgatgaatgtattatccgggaaatcgccggtgtgtatctccgcaccaattccttgcaagtccagtacatccacaaaaggccgagggatgaaaattctctcttcgaggcattcctgtatctcgactggaaatgtctcccaggactttcggcggcaggcgtcaaagcctacacccttgtatccttccatgagaagtacatacacgaggataccattcccacaagcgagatccacgaaccctgggaatgacgctgtgtttttcaatgactgctcttgttctgttgccggtcgagtgccgtacatgctcctccacagttcaattagacatgcagcgagagataactgctccagggcttggttgggcgattcaagttgttcaacccagttctgacgcaacttttctgcatactggagtttgagccgggcgtatgtgttttgaatgaggtgtgccgagacaatgtccccatctcgattaccttgctcaacccagtccaggctcacattcctagatgtggatcggcgttccatattggcggtttagatgagcaaatgtggctaagagtttcagtgtcctgctctcttggggggttggatggcttccctcggggctcatttgggtcagggaattggctttccactgtttaattggacatgttggcatgggtatttgcctggcagaatattcaactggatgcaaagagtacaaacagggcggaaaggaaggcggcagagcctacctaggtatagcctatctatagaagcattggatggccgcaaaaggggtgaatggcacactctgtaaccaaatggccccggtggtattcctggcctggtcaatatagccttgacgttatgacaaacgatagagggccatttcaaggttgtcatacagccaagttgctgtgtagactacctaggtagttgattgaggcagaataagaactctgaatcttgtcacagatccatggatgtatgcaaaatatcctgtaagacgaattgaaaagtaccaggcgtatccctatggtccacgtgcaagatgtgcgcgtcaacccacggtaagacaacagcagtcatcactacgcaaccataaaaagatgctataaacacaacagaccaaaacgaaagagaataaatcctccaactctccatccaaaaagaacaatccaccaatacaaaatgaacctgatccaactcctccttgccctaaccctcctgccagcaaccatagctgggtaccccacgtctcatcctcctaccgaagaacaccatgacaacaaacacaactggacctttgacctgttccacaacaagcattgcgccggaactacagtcagctacgcgggacaggggtcaacgggctgccgcactaatcttgagaacggaggtgcggaggctttcatcaacgtcaatatcgatcggaactgtaaggtgaattgttccgggataagagatgttcacgacatgcgatgatcgaagagatcaagactggaaccactaccaagtgcaggcctatctcgcggaagaaaacggcccacagttttgaggtctcttgtcggtgatatcttgataccctccagggctctggggcttggttattcagctacaagggacctcgagatatcatcgggtaccaaaagataacataatgtctaattactaaaaagaaatcccaaacacttgaagtccaatgtgcaaatgtgcaaatgtaccttttggaaacttccatagaaaaaggtgataagcccgttatcggggtccaccatgacgcaaagagaggagctgaactacttgaaccggattctcccagtcttcattcccttttttccccttttctttctctatactcaattcaaacatatacaatggctccccggtgctttattatccgccatggcgagacagaatggtcgcttaatggccgacacactggtctcaccgatctaccactgacagccaatggagagaagcgcattcaagcgacaggcaaagccctcgtcgggaacgacagactagttgttcccaagaagctcgttcatgtgtaagaaataatctgtctatgctgctgactcattattccactccaaagacaaagacaactaacacgccgttctagcttcgtctcgccccgcacccgcgctcagcgaaccctagagctgctcgagcttggctgtcgaggacggatgccttggagtgaacaggagaagcctgaacacaaggaggcgatccggaccgaggccgaggttgaagttacggaggcgattagagagtgggactacggggactatgaggggttgacgagcaagcagatccgcgagcagcgagctgagaggggcgaggggccgtggaatatttggaccgacggatgtcccggtggagagtaagtggttctttttttcattgtcttctgattctaggcctcgcctccagctatgtattgaatatttttgtggtgtcatctcatgctaacattcattcccctcctgccagatcccccgaggacgtcgttcgccgccttgacgctctgatcgacgaaatcagaaacaaataccagcgtccttgcttcgagaacccggatgaccccaagggcgatgtccttattgttgcgcacggccatattctgcgtgcttttgccatgcgctggaccgggaagccattgacggaaacaacgctgattctcgaggctggtggcataggcacactcaggtaagactcggccctttaagcagagaaaaattcccatctgccgtatatggagcataactaacatgactgaaaaaatagttatgaacaccataacatcgatgagccagcagtcatcctcggtggtcaatttgtggtggaataaaataacaccttagttggatagagaggacataggagaaaggaggtcatatctctgctgttagacattagacatatgttagcataagtcatggagcccatcacccacagcccattgtaaagcactacaacaacaatcctgaccaatccgactcaccatatcatatcaaatcaatactcaatcattgatgattaatcaactcaatcctcatcactctcctccctctttattcccccctcttcggaatcggcctttttatccttatccgcatttcccttaaccccctcctcgcccagaatcttcgcagaccccataaacagggccccagaatacccgcctagaaagcgcatgtcccccgcctgcacagcggtcatgcggagaaggttctctgtgtcggcgagattggcgttgagctgggcgagctgggcatggaggtgggcatattgccgcgacttagcagcggacatggatggggtcgaggcgttggagttatagttgggggtgtatgtagtgttcgggttggtgttgaatgtgtgggttgctgtagtgttgtagttgctccctgggagggttgaggggcgggagtatgtggtgttcgattcttggcggcgatggattggagggggcggcattttgggtgtgatctgcttgaaaacaggatttggtgggagtgtggtgctgggtatgggttttctttgtgtgcaggttggattgattttgaggttggggcttgttgacattatttgaccgcgggtttgttcactatcaggtgatcacgtggagatactctattttataacttccaaccttggaaggatgtattatgttggcattcgaatctctcatgttgtttgtcaaacaggtacttggaacatttggatgtaataaactgtagcaacctcaacgatataacggaaaggtctatcaattcgtgtgctccttggaagaataaagtgctgttcaaaagacgcagcgaaactgaccactgcggtgcaccctccactcattttctcagcaaagcgcgaacccagcaagcagatcaacacaactcaatgaaccgaataaattcaacctccgctcttttggaatgcgccagagacccagagaccagaccacaaaatcaaagacgaggccgtttgcatcaagccactcggatgagagacaaggaaaaagacatgacaaatgaagggaataccgggagcggagcgaatgatgataaaacagacagaatgaagacaataggcgtatacgagtctagatgggaggggaaaggaatgcgccagctgtgtagtatacagtcatgcaaagagatgaaaaggtaggcagggaggccgacgacgctatatcgacatgctgtaaagatgaaaacggagggaggaagagaaacagcaaggataaggatgtcccagtctaggctcgcgtactggcctcattaaaaatcgataatgccgcgaaacagaatgagtatcgatgcagagcaaatcacacaaaaggaaataaaacacgcacgcacacctcgttatactaaccacactccgaaaccggaaagaaaaaggaaataaaaaaattgagcaacgaatacccctatgtccctcatgtatatgtaaagaagcgaacagcccagtattaaccagtgcttcgagagcacgggaccgaagaataaagtccccgcataatgacaccatgatgcaaaaaggtccaaacatgaccaattttcagcggacgatgatggtccacgccgaggaagaatgcaatgccgaaagggaaatcaatcatggaacgccggtcagccgttgggaaaagcggagggaaaccccgtttcttcttagcgaacgggcgccgcgatcccctggccgccgaggctgacctgactgctgtgagatgagggttcggaatcaatatttgcactagctccactatcaccactccccgcgctggcgctcgcacttccggtcagattctggtttttaggaggacctttagcggggaacgcgttgctcaccccatagtgttgctcaacttgctgcggccctaccgcgtttccttgtcccggaggataccgcggcaccggcgtacgcatgttaccaggaggcgatggctggccattgtgaggtgcaccaggggggccaagactgtgttcacgggcaattggagggcggcccatccgggggcctcctgggccggggggtccatggggtccgggaggcccgcccattggaattataggagtctggctgtttcgccggctttgtgggaagggtcgaggtgggtagtcgcccatgtggcttgccgttaaagaattggctcgagaatccacgtgcatctggtttcggtcaacagctccatatctgttggaggagtagctcatcatggggttgtccatgagtgaatcatggagacctgggatttcttgcattacacgttcgctcgtgcgtttcctgccaaagtagcggttgaaggctgatgaggacgggcggctgcctccagagggaggagtgtttataccgaattcggggtttttacgcaactggctgtggctggggcccttgcgtccacggcgggaagtcatgctcatcatatcgacactgtcagggtcgatgtgagggatcgccatgttatccattggatcgaaataatcctcgtcttcttcgtcaaaggctgtagcagggcgggagggaaccggtccacgacgtcctgggcccggggggcctctgcgcatgctcatctcttgttcacgcagctgcagctcgcgttgacgaagcgccagctctcgctcccttaatgtcaattcagcagcagggccagatgctggctcggggtacccatttccattctgatgcggtatagttggttcaccctgttcgtcatagacaaccaaatggctgaattcttcgagtccctccaatgatgggtcgcgctgaactcggttgagaggcggcatcggcatcggtccgcctgggcctcttggcatcataccagggggtgggcctcgtctctgtggcgtgggcatgcccatacccgagggtgttcggcttccacgcataggtggcgggccaccattcatcatgggtcgctgctgtggaggtgcggaagacaatcggggaggcggctgacccatgacggatgcaggtggagactcctgccggggcttgttctggtttgcgatattgacgtgatgtagcattgcatacattgtttcgattcggggaatgcggacattggactcgattgccaacttgattggtgaccctaggaaagtctcaacctccatagggcgtcggccctggaaatccgagtacattgtggtcggagagtccaacgcgatcattctttggaccgtcttatcccggaaatcgcccgggaatgagcaaccgtgcgcagaggccagctccatcatttcgtcaatgatgcccattaccagtggacgaacaccggttttttcgagcagttgtgtatggtttggggtttcgaacacgacacttgcgggatggaaggcgatggggctgggagacgtttagcatgcaagttctagatccaagcgaatccgaagtaactcaccctatcattcggtcgaactgctcctgtctgatattatccgaaaccttgcagtcaacctgaccggagttcaaagtcattgctaacgccgctgccatatcgctctggattgatgtcgggatggaggaagatttgttggttgcgcccacgtaaatctcgctcgagcttaaatgttcgaactcgctagggcccgtttgggagatttccacgttggagacgagagaaaggatgacgttggttgggtatctttgctcaaggtgggcttcaatgccgagggtatttgtggtattcaccaggatacaggtgtgctggggagtgacgacggattcaataacggaggcaaggtcatagacatccggtagggctttcacgcagaggatgacatagtcgtaggcattttcacgggatgaggcttcttcgggagcacgaacaactataaatcgggacaggtcagtcggggtcctggctagggctcaggccgagtggtgaaatccgaatctcaccatgtcggggtttgaatcgttcattgccgaatgcttttgatctgcggagggaattagccatctgtctgtgacacaagaacctggatacatacttaaatgagacaccgtattgagacacagcgtcaaatccggatttccagaccagcgtaacgtcacaggaagttgtcgcctgaagtcgccatgagagaaaggcagagatcgcattgccgccaactacacagactctagttagacgacgaaccatcttcttttttcgtagtatcccagacgttgaaatctaggctgaagttgaactcaccggacagaatgcgcagacgtggaggaggagccatctctcaaaatctggaaggaactggggcgggaaagtcccaggtcaaaaggtccaggtgccctataacagaggaaaacgagagaatggaagaaaagagcgaagggtgagtgaaggagagaagagggaagaggaatgggggggggacaaaaaaaaaaaaggaaggagagttgtaatcaggaaggatgaaattcgaatggaagtttagaccgggggggaaggaaaagacagggttgtccacgttcaagtttatttttgcccgtgttagttatctttctcttttccctcttactctctcttgacttcacgctttaggagagagagagaaggaaaaaaaaaagaaagagggcaaaaacgattgaatgcgatcggtcaacaaaatatctttttatttttctccttgatactcgcaagccctcaatgatcgtggatcccctcagtccggaaacggaaatcaaggagcgataagaatatttgacgacgggaaagagatggatgcagatgttcttgatcttgtcgttcttgatcttctttcttttgctctctttccgtctatcttggtacatatgtactcatacacactctatccgttctactccctactccgtacatagtaaggatctagcctccacctcatctagccattttgaggctctccaatataacaatagaaataatggagctcttttctcatatcctacgtagtaaatacttagacacatgaatagttggaggtatctacacctcaattatatatagcaacttgtgttgtgtactagtataagctaaaggttgaaggttgggcactgtacggagtacatatgccttgatagtctgatgctatatttaacttattttctttttccgatcataccgagaaatacggtaattttcaaattgacttttgttggcccacaaacggtctctccgatctgcttcgggccttgttttttttttttttcttcgcccccctctatgtacatctgtactccgtggtatatactccgtattgtactgctcttttgaagttcgctctcggggattttcactagaacgcgttttatgccgcgtctttaatctcgtcatctacctccactctaaaagcattgaacccacagtctatctcggccggaactcatgtcgggcaagatgtagacctgtcaacaaggataagcctatgatcgggaatcccaccaacccagtacgtttgtactttgttcctggagacatgtaccgtaggtgttatcttccggtatgattctcattttagacccgaagtagacagcatacgatataaacttgtatcttcagttgctaagatgaagacaacatatcgggcacattctttgaatcattccaaggggatagataggtctagtttggctcccgctaaatcccacatacggcatcaagtgtgcatgtatacggtacctggagtggttcacacaacatgcagatgaacgcatcaattttgtatccctgatcgacatccaattgacaactggactgatgtaccacagaaaatggccaccgggcattgtacattgtatgttgtacgatttggaacaacggtgagaggggtcgatatccccctcttcctccccaccatcgtgacattctcttgaaccttggaatgttgtaattctggaacacctgtggtaatacaaaagagtggaaaaaaaagtgcatcaatcccgataccttggcaaggatattcacgacctttgattttagactcgttcaaactacctgactgggggacataggtcaccaatcgatcctgcacaaggcgggaggctgagaggattccaagggatgtccaggatcgaccatccgcatgccttagaagggggaggcggagttgataatccaagcataccaaagtaatgatcgacgcgcgtgccgaagcaatgatgcttgcagcttggaccgcatcaagggatcgtccccaagagtctttctgatatcggggaattttcttttagttcattcaatctgataatgacataaaaataggcctggtatgctatggcatgctcaagcagtgtgaaatgcaggtagtagctgcaatggctgtaatagttgcaatgtgctgttccggtccaacatgaaagggctagaacatggatcaatcacatctcctgtaggctggggtttatcacttgggaccagtccagatctctgggggagacggaacatgcgatgtaataataaaactaaatttgcatgtgcacaaataataaccccttgtgtaggtggaaccgcaatgatgacagtacattcgacacctctttttcttctctcggggccggagatagacaaaaccgactaaataggatggtgtattctattccattccgcacaatatacgtatatatccattcaaatgttgatgtgtggccatgccgacaggtggcaggggcacgaaccacgttagcgtagacccggaaacagatcttcaatataagagcatcatactccgtacatatgtattgtgttctcctcagccacaatcggtctttgctataaggaatgattttatggtgttagaggggaaagccacagatgtcatgactgcgccccaggaatatcgtaattgggcctgaaattgggctgagtacggagtatatgagtacccatatcatattagagagtttcctaccacgttttaccatagattagcaacgatctcacaatgcaaacatcatctcgctgaaaccaaattaatcttacagagacccccctggcttccataaagcctagagcccatgcacaagtcgattatggcccaattcttccggaacaccgcggatgtaagagaaaaaggagagaaaaaagtggtgagaatcgtgaatcgttctcgtacttcgtacagaaaaaaaaccacatttgtactaagagggtccctcaatcgtatcaatgcagagccattggccgatcataatttctgatcgacccgttccacactatttcttgtgtctagttgattgggctcccaaagttgagaagagctaactatgtattccgtacctaggtacgatgctgtgtgcatattgtagcttacaaacatgaagcatctccaaatcatgcgtcgaatgcagactttgcgcaacttatgagactcgtaactcacggcagctctaaagcgagactggacatttgaaaattcaaaatccgagacatgtcttcttggttttctctagtgcttggggctaagccaggtcggttttcaccttgattttcgcctcaaacagggtaatgtattaggtaactgtaatttatcacctgggcaggtctttttctgtgctttacgctttacgctttacgctttacgctttacggctttatacttagcttcgagttatgcggcccatatgtatatatatacataacttatgttccctcaggtacacggcactgcgcacttcacagtagataatcttggtttttgtctacatacatatcttgctacttacccttcaagaatatggcctcttcctcatgtgcatgtgttcagcttcgtagtcgtcatgacttcccttcagcatggccttgctaaccatacatgtacatatttatgttagttggcaggtaccctaaagcacgcatatttcacccaggttaaggtgatgtctcgcgtcagtcaaaaccacgtagctgatccaaggactgcgtaaaggatgatcaaaagttgatacgaaggctatgcaagtcagattggaaccacaaccactacatacattcaggttatagacatattgcatggtgggggtttattcctgggcccctagtgttacgttacagatggaccggctctaacagtcaagatgatcggagattgaattctgtgtctgtatccactttagctggatcggatcttggcagggtcttccggtcgtctggttgacaccacgaccgcagcgcggtgcatattttctatctgattgtctccggctttgacttatttcgcagacgtcgataactatgatatcgcaactccacattgagatcccaaggtccctgtcaggatacagtcaggatacggttggacagtcttgcagagctaacccattcttgcttccattgctgttttcgaatacatggaagggttgtgcctcacttcaaaaccacagaagggcagaggcagggcccaacggcggagaaaaacatatcaaaccccgagctagtgcgccataacaattgaaaaaaggaatagaaatttcaaatcaacaagttttcaccttgacacgcctaagccatgtaggtggtggagtcaacacccgcctcgggatactcactgtgaagaacagggttagcctttcgtcaaagggcatcatgaattggaattgagggaaacttacggaagagcaacctcaaagcgcttctcaatctccttaagaaccttctcgtcatcctcgttgctgacgaaggagatagaaagacccttggtaccgaaacgaccggcacgaccaacacggtgcaggtaagagtcagcgtcggcggggagatcgtagttgatggcgaggttaatgcgctcgatatcaataccacgaccgaagacatcagtggcaacacagatacgcttgttgaactccttgaactccttgtagcgcttgatactagatggaggtcagtaaatcgctgcggccaatggcgaactcggatgaacttaccgctcctcctggctgacaccagagtgaactgcgatactggggaagttgcactcgcgcaacagcttatccagctcgttggcacgttgggtgctcttgacaaagatgatgacctggttgaattcgaggttgtccaaaagctcattcagcttgcggttcttctccttctcgtcgagcttgatgtagtactgctgcaagccgtggagggtgagcttggtatcgtcatcgacatagacctccagcgggttgtgcataaacttcttgcagatgggacgaatctcctgggagagggtagcactgaacatcatgacctgcttgtcggcgggagtcgcacggaagatttcctgcacatcacggcgcatgtctgagtgagggtattagtgggatgtgataattgaatcgtatctcgcatgcacgtaccaatctggtccagcatcttgtcacactcgtcgagaacgaaggccttcacgttgcgcaaggacaatttcttgtcacggaccaacgcgttcagacgaccgggagtggccaccacaatgttggggtgggtttccttgttggacaggatttcgacgtccttctggatcggagtaccaccgtagaagaccgcagtcttaacatcgggcaagtacttcgagaaacgggcgtactcgttcttaatctgataagcgagctcacgggtgtggcacatgaccaggatctggcactcgccaggaacgggctccaattggtggagggtggtgagaacgaagaccgcggttttaccgagaccagacttggcctggcaaagaacgtcgacgttcagaatggaagtcggaatgcaaacttgctggactgttggaaggcggagccgatgttagattgggttcgacgaaagaagaagcaaaaaaaaaatccgtctcgcaatgtccgtccatcccctgacaacatcacatcgatgcgtgggcggtcatcttccaccacttggtcagatcaccatcactgtatgtcacattcaaaagccatgctctttgtgaatatcctatcatattctgcagacaacatgaggtgcgcctcacaaggagacaaacgtgatagatatcagtcttgcaccgcatgcgccaatatccacgaagtacgtgggagttggagacagaggctcaggctcagcgcaagagcgccgcaggaccaaacacatgtatattgtaaagaatattgtccttttccaggagcaataatccccatgtcgtctgcagattcgaaacacgacggattgccaaataccgacagaagaatcttcccgcaaggatggacggacgttggagattggacaaatggaggaacgcttgtgggaatgatgagttagactaaccctccgatggatgttcgaagccgcagtcggtgatggcgcgcagaagttcacccttcagcaggaagtcgcggaaaccggttgagtggataccgacgtagctgcccttcttgtcaggacggccaccggttacagtcaagtcaccctgcttgtcggcatcgccattggtggcggcaggcgcagcagtggtggccggtgcagtggtggtctgaagctcctcatcagagtagtcgataagatcttcctcgtgagacatggcgacgtaaataggcgagttttaggggggaaaggtaaaagtattgcgaaagagagatgacgttgggttgaagtgaaaagaagacaaaggtagtaaggagaagagtatggaccgcgggaatgtggcaggtctcgatagacaaaggtgcaggggaagaagtcgcaaggcggtaggacgaagacctcaccaagggagtatcacgtgattgttcagcctcaccgcttgcggactagcgtcaatgggaagcttttctcgaattgcaagttgcaaacaattttgagatccacttggtgatctgtcgaattttcgagaatggcaaaagccaaaggaaagaaggaagccaagaattctaagaactctcagagccatattcgagcacggctggattacctacaccaagccgccgcatatttccagggcaaatctacactcgccaaggatcagaacgccgaagttcacaacaatgagcacacctcagttgctgttcatattgactcaggggataacggacgcccagtagacactcagcaacaagtcttctccgtgaatcaaaagacgactcaagagccattgagaaacctctcaagggtatgtgtatcacatctacgcgctgtggcaatgaagacgcagattcggctgccgatcacactaaaaagatcagtgtgcaagcgctgtgatacaatcctggtgccggggctgacttgctcgcgcgaaaccagaaacgcaagtcgcggcggcaagaagccatgggccgatgtactggtcgtccggtgcctctcatgcgggactgaaaagcgatttcctcagacggagaaacgcgggaaaaagctcgttgagcgccgcaaggaaaaggactcggccttgctacgcggtgtgaatgcacaaaaagcggatacttctgcggcgtcgcaaggagaagcagtcgaattgcgtgaagagaacgtgccaatgttggatgctgcagatgtgtcaatgacgtgaatagcacccgcaaatccagttaccacgcgtggggtcatttccatatatgaattttacgccctgcgcattgtcacatgtcctgcagaacacaaaaccggggcaggtcacactttcagcgtgcgttcgtcgacaggcgagtgtgccaatttttgctatatcgatgatatgaccaaggtgctctgtgacggccgtcggccacagtcttttttgatcggcttttaccatgacatctcagctacaatgaccaggggtttcgataaaacaaggagaaccgtgtccaccctcatcacctaaagaagtttcaaaccccgtgagtagcctcgatatacctccagcaaccaccccgacgacctgcttgttcaaatacaggtcctgacatttcaatatccatgtcgaccttggaggactcaatgcaacgcgacgtacgattcaattgttttgaaggaacttttcttatattgcagtgaacaccataagccaagctataatcatcccagcaatggacatggcccaacatcaacgcagaaaaagaaagcccagagcaatgtacacgcaacatgcagaaaggggaatcgaaacaacatgggggaatagcagaagcatcaaatcaagcaagaaagcgcaaagatggtcgtgtttatgcgcttgaaatcacattaaaaatccttcatgatggtcatcaaatctcatggatttccagtaccgggtggaaaccgagttgtcatggccgtcatcggcgcagctcaagcagtcgtgacaatgcggcattcgtttcgaggtcgcatgctcaacaccggtgtctcgcctcggtagtgccgcgaggcatgcagttctttcagtcaattgtttcataaaacagatacccagtccaacgaaatgtgacaaatctgaatacggtggctgccgagcattcaaaaagaaaaaaacggtccgtgagggacattcgatgtatagttttttgttctgtcggctttggtatgttctggttcggttacttgtgtggaggaaatataggtgtgtattggtcggaccatccagtggtcgagtaaaagcgagatgtgcagaaacgcatgaccgtacaggatctttcggaacgcttcaagtaggtgtgtgtttgaaggaagtatatggagggagtgtatatgggaagacatcatcgtcggcgccgagaactctggtcaatgcggtgatctaggttctcgatccggccacggaatgatttgacaatatcacggatatgagcgaccttcgccaactcattgtccaactcgtcgatagaggccaggatttcacgggtgcgggcaatttcggcatcggcattgcgaatgacgtttcccgcacggtcgtaggtgttttggatagagcgctgcatttgatcctcgagctagtgaggatgcctcgtgttaaaccaacgaaatgtgatttcccgatgatatagacatgcggtcaagaatcgcagggggaaaacatacatattcgatccggtgactgatctgagcctgcaaaccgtccagctggtgcgatagtgcgcggaggctcatagggtctaatagcaaacggccctgactgctggcagcgctggtcgcgcgcgaactggaattgctggttctcccggtgcctctgcctctggccaccccattgccggaatggccgccctgcaaggcaatctgctgctgctgtcggaggatctgaatctcggaggaggtgaggccaagcgaagtgtcggggatcgaggctgagacggacatttggtcccggcagagacatgctccgaccgcgacagtctacgaggcgccgatcaaactcgaagtgagaccaaacggaccacaggtcatgatggaggatggagggtatagagaggatagtttgcgatatactgcagtcggatcggggaaggcgactattgacggttaaagaggggagggaagcttctttttcctccctcatgaggagaaatcaaaaaggaaaaaaaaaagaggcggagaaagtaggtgtgagccgctgggagttcggcggcaactaaacagcgcgcggctcgagggaagccagttacactccccgaggaagagcctagtgccagaccagattttatatgttctggagcacaggctcaggcggaaatatgacacctcggacctccccataaagaggggcttgatgatggaacgaaagtcaaggaaaagatataaataattatttagaacattatgtatttcttcttttgatgctttagtgtctttcttttgtttcattccttaagtacttcttcaatgtattttatattggatattgcgcaggttaggctaaatgctctgcacctatctcaacgaggtggaagaagcaagaggttctgcaataggtctgccaaagctatggtagaattgcaatagttgatgatatacatgtgccatgctaacaatacctctattaatactctgggaaatataaaagtccatatagagatgcataatgtacgatatgttgtagtcccaattccgaaccatggtagctctctctccactcttcctacggaggacagcagcgaccagatgagacttaactttgattgggttcaaagcgcaccgcttctttctccgccttagctgtgtgtaactaattaagtagttttctgcctgccaaaaaatatccaggacttgaccttggaactcttccgggctgcatcactctgcacttaaccaaatctcaacttcaacctcaacctcaacttctttactcagccacgactactatgcccaagcttggttacctagattgtgaggctgaaactgtcaattttgcttgacacaccgctcgttcataagactttctcacattctcacattcggcctgtgagtgtcacccaatcgcaatcccggccacctgcagtcgcgacctgacggcccaacacgatccatccagtcgaggtgacctaacgcactgatcaccctttagtctgcgaaacagacaaaccggctaccctcattgcgcgccttcttgagttcgcgccgtggattattgtttccaaccatacccgtcacctgcgacagccccacagagcccagacatttgtaccgtgcctagtctgcgatctctggaattgattcgacgagagctcgtggcatttattacgggcctgggcagctagcttatgccgtaccgataattacgaacacgcacaccaatcccaacaccaacaccagcacgacgtcatggccaaagacaaagagcgctcggtcaaccctgccgtagcgcagcgaaaacaggataaacaaaaagagttgagaaagggcaagtcagaggcaatagcgcgccgaaacgagaaacttgcgcgccgcaatccagatcgaatccagcgacagatcaacagcttcaaagaagccgaggaatcaggacaacagctacggccgcgcgataaggagcttctcgaagcgctggagaaggatttgcggagcgttttgaaggcgcgtgaagctcttggcgaaaaggcgccccggttcgaccatggcggcagaggaggccgccagggtgatggtgcgagacgaggtggtggtgatggcgtgcttgggaagcgaaggcgaggctcagatgaaacaagaatgcctcatgatagtgacagtagcgatacggatgaggacgtacgaaggatacccatgccgcgggatacaccgccaccactcccgcgccagcaccagcgcagacgggatgacaatgtgccttcagaacagaacgttgagctcagaggtcctcatccactgccatctcgtccgaccgcggttccagcggccaggactgtttacgaggcgaagccccaaattcgggacttgcgtcaagaggcgaccaagaagtttgttccggctgccgtcaggatgaaacagcagtcaatcaagggacaggggaagttgttagaaccagaagagctggacaagcttgagaaagcagggtataatgccggccccgttccggaagcacagggtgacgattcggcacaggaggactggatgttgacgttagaagaagaggagcggcgtcttaaccaggagcgcaagtttgttcagatagaagaggtcgaagatgaggagtcgtgggcttaatatctgacctcttgaatatatatttcatcaaacgtgatgcacatatcatgctgcggatttcaatgggatgtgcatacttgtgtataccatctagtagtctgaaggagtggcgaagtgttggtcatgtaccttagggctaatacttcggaaatgtctcgactcacatgcctagaaagtcagcatagcatttacaaacctactaaaattctggaatgaacgacgtatgtttgcctatgaaagtaggtatgtacacccaacattaaagcattgcagcaccggaactccaaatttgtaaaacatgagacaccaaaatgcaatgagcactcttgaagaacatgcctaaggacgaagcttccagacttgaagtagggctaaggattcccgagtgactgcaaatattagtccaataataaacagcaacatatgtgcaacggacgaggatacgacgagtaatcaattagacattcagagaaagaggaagcagaatacaaaaattcaacaatcggtgcatggctaatgcaaataaatgtacaagagaactcggatcatctccttgtttgaaggaaaggggcatgacggcataaacaacaaaagaaaaagtagtaaagagtcgagtcggtgaggcaagtgtgtagccaacgaaggcaaagatccatgggcgtgcccatggacatgtgtatcaaactccgtgtcttgcatgtggcaaggatgctccgaaaaaattagggccaactccgtgacatagtgggaaagtatgcgcaagaagcgaaagtgcaaaaccccaaaatggtgggcaacgggaactgaaaagaaaccaaatcatccaaatctaagaccaggaaaaaaaagaaaaaaaacctccagtccggaacaaactccaatcacaccaaggcgccataagaaatccgaaaccagaaccaacccgaaaaaaagacaaagtaaatgcaacagaaatctgatctgagtgaaagactaccgcaggttgcggataaccttcttgccgcgggcaaggaagggactaggcatctcatccagttcagggttccagatagcaggagcatcacgttcagagcattttacgctcatggtgggaccgccagcgcgtgagtcactggcacaacgcttgacttcatccatcggacggcctccggctctcgcctgtgcaagttcaaccagagtgcggccacccatgttgcgttgcataacagccttgaacatctcttcaccgccacccccattcttgacaggaggttgttgcttcgaggtactcttgcgagttggcgatgtgcccgcgtcggcagcgagattggcagatgaggggattttagttagacggcgatggggagacctggatctgctctcacttgcaccgcgctcttcagactcggaaatagatgcactcgtcgattgaggaaggcgagtaccgctggaagggaacaaagaaggctgagtgctaagtttctgcatgagagccgcggtattctgacgaagtagaggtcgtcgaggcgccttcaatgggtcgggcttcaccttgggccgagttggtgagggcaagtcgggggtatcgtcctcatcatcagagtaggccagggtgggctcccacttcgctttgttccgctccgcctctgcaaagatgttgcgcgcgcctccttggccggaagtgcggcgaggggacagggaaagcgaagcgattgaaatgggtgacggctcagccatttgaacgtccaccggtgaatcaacaacggtcttagaccgacaaaagggcgttcgcgtctctttcttgggctgttttcgggcatttgatggaggagagccaagggacagctggctgatgtcggcgcttgatgagggagtactatcgctgtcgtctgtcatatttgcagaagaccgagaagaccgccaaccttggttgctggatcgagaggacccagagccgtgggtacttgtgcggaatacatcgtctcgggcggtgttgttattggaagtgttgtgcttgtacttcttcacttcaatggcaaccctttcttgcacttcagactcaaatcgcttgcggagtcgatcaagttcgctttgcacctggcgatcaatctccaagcgtgctttgacctcccactctcgtcgaactgtattttcgatttcggccttgatattttgcttttctgattctctcttagcgaggttctgctccatttcgcggactttatgaacagcgatctcctcacgtcggcgcagggtctttccgaggtcaacaacctctttctccttgcgcatcaagcggatgataggaagattaatcagagcggaagtatcagggcggtgatcgggattgacccgcagacagcttccgataacgttcttgagctctggtgaatagtaatcaggcaagggagcaaattttccctcgcgaatcttttggactagttgaatgtgggtgcgagcgttgaaagggggctctttctggcagagctcgtacatgatgcagcccaccgcccaaatgtcggagcgcagggtgtatttttcagccgcacagatttccggtgacatgtagaaaggtgtaccaacataagttgatgcaaaatcatgagactgcatttgcttggacaagccgaaatcgcctagcttgacggtgttgtcactaccgaggaagatgttctccggctttagatcgcgatgcaagatagtgacttgcccctgttttcccttgagaccagacggcttgggaggtgggcccagaatgtttgatccgacctcggcgggatcagatccgtagtgacaccggaacaaagcagtgacaagctgggagagaatgcgccagacaaactcctcttcggcgtatttgttggctttcttcaaattcttgataaccatacctaggtctccaccaccacagtactccatatagaggtacaggtcctggctggccttgagatgctcccggtggtagtatgcgacgatgtttgggtgacgaagggaactcaaaatgttgaactcggcagtgagttgttcgcgttctttctgtgacattttgatgtaattgatttccttgcggcatagtatctataggagcaaattgaggttagttctggttgcaagatgccaataatgcactacacttacgaatccatctgacttccgcttgactttgcgaatgatcccgaaggaaccgcaacctgaatgaatacacaagattagttttgaacatataaaatatgaattgggttcacaagaaggcagagcataccaattttgtccaaaatctcatacttatcggcctcagccaaagcaatcgccatggctatagattgctgtagagtttaggacaataagttgaagacgaaacaggtgaatgagagtcaatgatgcatgaacgttgtgagactagatcctgtgttagtaaaaaaaagagtcgaactgcagaattgaagatttgaggaagagtcaaggcattatgaattggagctttgaagatgggtgtttgggggatcgttgctatgcaacggtgattatggcgctttcccgaacccggcaggcggtgggggaaggagatcaaacggtcgtcaggagaggcaaaaccctgaaatgacgtttgttcaattacagttcgatggcttgcacacctatgtacctacattatgtatacttgaaatatatatatccaatggatacttcaaccattagatgtctttttatcacactactaattctcaatgtctgtacaatatagaaacccccttaatttcgtagttcacaggtacatggtcacgtgcttatcgataagcctgtttccgccccgccattgccgtttgccctcatcccacttcgacctgttgttgctggcaacctgcatgatggatgagccaactgtgctgcggaaggatcagctggagattagcttagtcaatgagaagcagttgattaaggagggcactataaaggatgataaccctttagatctcagtgagccattccatcaactatgcagcgcatgtcgtcagggcgatttgaaagtctgccaggagaaaatcaccgagggtgtcaatgttaatgctcgtgatccctatgattatacgccattgatcctggtgagtaaatatattgacaaaccgaccatacccatcccgcgtaccacatcctaaccgatggaaccggtaggcgagtctctgtggtcattatgaagttgtacaacttcttcttgagtccggtgcactttgcgagcgagacacgtttcagggcgaaaggtaaatagcaattgatcctatatagagtggctagaattaacgatggtggttttatagatgtctctataatgccctaaacgaccggatacgaaacctcctcctggaatatgattattccaagtccacggaccccctccagccgctagccgcgcatataacttcgcttctcacccgtgagtctccattgacggcagatattgttgtgactgcatccgatgaatcgcttcaccttcacaaatttatcctcgcggcacgctctccatatttccatggtaaactagctgtggcaccacaatctgcaacattggatctccccaataccattcctccggaggcattcggggccgctatcaaatacatgtactttggtgaagcccctcgggacttgagaagtggacctggaacaggcttcacggagtcagagacatttgcaggggtggatagaatctccaagtacttggagatccccggtctcctagacagtattcttgatagcggagataggagacgtgccagacaaagaagaaccgacgatatttccaagggccgagatcaaatggaacaatggttccaggagaatattctggggaacaagctcgaggtggagacttcgaaagtgaacgaagtgaaatgggatcgaagcaatgcaatcttcgctgatgttcttctgagggcggatgaactccccgaggaagaggaggaagcgaacattgatacaccagaggtcagcaatggcacatccagttcgattcccgttggccctatctctacctcgaatgagaagagacttgacaagccgaaatcagttgtcttcccatgccatcgagcaatgcttttacggtctgaatttttccagaccatgttcacatccacttttcgcgaagcttacctcaaggagcatctgacaatcatcgatgtcaactgttcgcccgaggtcttggaaattattcttacgttcttatacaccgaaagagccgatttccccttagagatcgcgatcgatgtcctattcgccgcagatatgctcttcattgagaagctgaagacaaaagccgccgtggtcatcagcaccctcggcagtgctggaatgtcccaggctgaggctgcgaaaactcgaggaatggcggacgaagatgatattgacatttactcaattgttcgagctgcgtggttgacgcgcgtgcagcggttggaagaattcgccgctcgatatctcgcttatcgactggaagcacatatagatagtccagaatttgcggagttgattaaggaatcagcatctcgtattaaggcgagacaggaaaccgattccattgaaatgctggatgatatccggttctatcttggagagcggtttagattgagatttgatgaggctggtctgcatgagatgatggaagaaaaagaactaccggaagatctagacgaagacgggcagccagaagacgttataagtattacagaagatatccagaacctggatgtttccagagaggctatccccagtcaaggccagcagccgcacgtccatgccccggagcttcgaactctcgacggcgccgttgtcgcggatgaattctcggaagatgcgatgaactatgagatcctgctcgagaagctggatgacttgctcgaaagactcaatctcgaggcttaggcgttcaaggttttgccgctggcctccaaattagccggccaacagcgtctcctgataccatcggactgttcaagtggcttctgggctgattggtttatccagcggccctggattggagatcaagacagtgtctggaaatgaaaggtgcacctgtgaggaacttcgacatgcactcagccctctgatggaacctttgtggtgacactcattgcagactcccggcaggagggaaaaagatatgtttttgtctataaacaaaagaagtagtgcctgattttgaatagcacatcaggttatgtacataaaaactgatattgcccagtgacaagcagtcaaattcattaatagaagtccaatgcctccagacttcgcaggccatgatttgatcgtgtagatgcgactcgaagatcaccttcaagtgaaactggtctggcagaaattattacgcggctagtggatattgagaccttgttggaaatagtcgatagcccccgccttgtattcgaatcgaaagtggtgcgcggcccttcggaagatcaaagcgtgccggctgcatcgtgggttggttcgcataagcggtagttgtgaatccgttggctccgttcggcaaagactccgtagtgctcatcgacttccattctgttgatcctgatcattaccaccgatgcctttctgctgcttttccagcatccttgcatccaagtcccgtatctggttctcgattatgcctctccgcgcgatcaagttggagcgcattccctgcagggcttttgtttgctcatcaaacgttgattcttgccgtttctttgctgtctatatcgcatgaattgttaaatctggaatgggattcaatgacacgactggagacaaacggatgacttcggtgaagatggatccgctcatacctcggcaatttcttgatttgttttaagaccagctccgtaaagagtgcccgtaatagtaatagaaacgacggcagcagttaagaccaacctcttgatattcggaggaggcatggtgagtgctatacaaagtcgaagctgcttggtcgcaactaattggccatttcgaggctttcaccgcctactaaacccagactttctattgatcgcggacgcgttcccctcgcgtttgacttgaacaaagagacgccgaacaaagcgaattccacagacagcccatgaggctccctctacatctacttgagggttccaaccaacatggcgtcacccagtcttcctcgtcgtcgacctcacagcgaagatgaagaggaaggcggagaccctacgtttactcctccagcccaaccctcgaaccacaaacgcccccgcttggaccccactgagagcgatgatggctccgagcctggagccgagagtgaaggtggaggcgaaggagaaagtgatggggatagtgctggatctgaaacaccagaagcagcttctcaggccccgcgtgcgatagcccacgatggccttggccccggtggctataaaccgggtgcgatcgtgcggatcaaggtgacaaacttcgtgacatacacgtcggcagtattctaccctggaccaaagctcaacatggtcattggtccaaatggaacgggcaaaagcaccctagtctgtgccatctgcttgggcctgggatggggacctcaggtatgacccggactataatactgcacagccttctcatactgacactaatgtgattgctagcatcttggacgcgctaaagacctaggcgagtttgtgaagcatggggcccgggaggctacgattgagattgaactatgcggaccgcccaagattggtcacaatcctgtcatccagcgaaccatcaagcgtgatggcaataagagctcatttacagtcaatggagcgaatgcctctaagaatgatgtgttgaaactggcccagtctttcgccatccaggtagacaatctctgtcaattcctccctcaggataaggtcgccgagtttgctgcactcacgccgattgagcttcttcattccacgcaaagagcagcggctggtccggaaatgacccagtggcacgatgccttgaagaggctaagggccgagcagaagaaactcgagatggacaacagtggcgacaaggaattgctagaaaacatggagaatcgtcaagagatgcaaagagctgatgtcgaaagaatgcgccagagagccgtgatcaagcgaaaaatcgaaattcttgagcgttgccgtccaattgtggagtacaaggaacaccacaacgctgtcgaggccctgaaggttaccaaggctgaagttgagcgtgaatatcatcggatccaagcagagaacgagcctattttgcgtgcagtcaacgccaaagaggcttatatcgcgcaattgaacagcgtaaaagacgaccgaaaggattctgttggcgaggcatctagggtcgctgctgaacgcggccgaaaaatcgatgaatttgagaacaagatcaaggatctcaacgatcagattgaggccgaaaggaaaagtggtcaaaggcacaagtccgaagcagcattggctcaacaagctatcaatagacttcgacgccaacaagaagaggaggccgtggagttcgacccggaattttacaacgagaccttggtaagaaactctaaatactatatcgttgaccggtatgcttatcaccgcattagagagagaaacggctcaaaaaacgcgagcttgagatgaaggccagagaaatccaagacagaaaacagcctcttcaggaccagcaacaacaggttcaaaggaacatccagcaggcagaacgccagctgagcagcttggactcggcctccggccagcaagaactcaagttgcagagactatctcacgatacgctgaaagcctataggtggcttcttgagaaccaaagcaagtttgaaaaggaagtcttcggccctccaatcgttacgtgctcaatcaccgaccctaaatatgccgatgcagtcgagtctttattccagaagacagacttcacatcgttcaccgtgcagaccaggaaagatttccgcaccttgcaacatgcgattaaccaaacattggggctccatgacattagtatccgcacttgctcgctgtccttagatactatgagggctccaatgcctaacgatcaacttgcccagttgggattcgatggttgggcaagggactttctggttggacccgatcctgtcattgccatgctgtgcagcgagaagaacctgcattcaacacctatcggactacgtgaaatctcaaatgaagtgtttgcccgtttggaggagggtgtgatgagctcctgggtatctggaaaaagaagctatcaagtgactcggcgtagagagtatggacctggtgccacctcaacccgggttcgagagatcaagcctgctcaggtgtggaccgaacagcctgttgatgtttcccttcaacgtgaacaccaacagaacatcattttgtggaatgaacagctgcaggacatcaaggagaagctcgagtctgagagggctgccgtgctaaagatacgcgaagaacacgagcaggccgagcgagaaatggtattttgaagagttctcttgctttcatcacatcgcgtactaacttttactgcagaacgacattgagaaagaaaagagcgcaaaacagaccgctcacactcagtatcgagcaatccccgagaagatctgtatgtttcgtttcttgttctgccgtctgacactagtctaacaacttgcagctcaacaagaggccaaatttcgaaacattacatcgatgtttgatggggtacggggaagagttcgtggatttcgcaaccagcaagacgaaattgcaattcaaaaggctgaggccgctgtcgaatatgccgtaagttcatcactgatatttctgtctacttttatctaacgcaatgcaggatgccgtggaattgttccgccaagctcatgaggagctcatgaaagtcgaggtcctactcttggaggcaacttccgatcttcagaccctgcggcatcgcaacattgatagtacgaagctgctcgaaacaaagagacgagaggcccaggaagctacagtcaaattaagggaatccaaagtgaaggccagagcagttttgcaaaaagcccagcgaatcagccgagaactacacgacgaacccgacgcgcaagctatacttgaaggactcgacgatcatgacatggataaactggaagccgacattgactccgaaaaggcccgcctggagctcacccatggtggtagtagccacatgatcaaggagttcgaggaccgtgaaagatccatcgagaagttgcgctccaaactcgccgacttcctaaacaagcttacggaacttggcaacgccatcgcagacatccgcaaggactgggagcccaagttggaagcgctcatcgagaagattagcgatgccttctcggattccttccgccgcatcggatgcgctggccaggttaccttgggcaaagcagaaggtgaacctggacccaatggcgagcctggtgctagcgagtttggcgagtggtcgatcgtgatccatgtccagttccgcgagggcgcgggcctgtcggtcttggattcacatcgccagtctggtggtgagcgagccgtgagcaccatcttctatctcatggcactccagtcgctctcggcctcgcccttccgggttgttgatgagatcaatcaaggtatggatccgcgaaacgagcgcatggttcacggacgcctggtcgacatcgcctgtgcctcgagcgagaccgaggaaaccgacgagaatggcaaccccatcgggggtggtggaggtggccaatacttcctcattacaccgaagctgcttgaacaactatcttacaagccgggtatgcgggtgctttgcatctacagtggagagcatatgcccgaagattatgataagaccaacttcaagaaggcaatcaggagcatgagggcagtggcggccggcgcgatcaccagtgggccatctgagcctatgcaaagcattggtcaagtggacgtctatgcctaataatgaagttctcggggattagtttattcttttgcgatacccaatttaccccaatttatccatttaccagtttacccagtctaccccatttgcctcatttggccagtctctcgaacctccgataagaggccctttgatctctgatttcggagaaagaaaaaaggagcatatctacgtatgttgtagtcatgagcaagtttgttttactatgcatattgtctataatgactatacaaatagatcagacgatatgaagatcagaccaatcccaacgtgggtctcgcacagacacggagtggccgatcatgcatatggggtcaaaagggagccgcagtgaccaattcaaagaggttaacgaggcccttaccaaagacggcaaaagaggtcaaagaccgtttacgcctttcttggcttgttcctctttggcctagaaagttcgatgaaaaggattctcatccctgcttcggatcggacgattggactgaaaaagaaatagatcgcttggtataatcaaaggaaaaagaagagaaaaagaaaaagaaaaaaaaaaagaaaaaaagaaacctgaaaaagaagagagctcagatcgaaaggtcgatcaccggaggattgcacaccaataggcggtcaacaatgacatttcgctatcaactctaatctgcttttgatttcaatactcttgtcttctctaggtagaccatgcatatgcacgttgatcgacgcctttttggtctattcattattctagtctttgcctctttgcctcttgtatatgtttcatgtttcagatatgtattatcctactccgagtctctctttctttttttttcttttttctgttaagttcttgttactcattacaccgcttactttcaccaaattggcttactggacactttctattctgtagtgagtcacttgtctccttcctacctgcaaagccgatacatcaggtttcaataccagtgatgcatcatggcggagagtcctgcacggccctcagactcagatcaacgcattggtcactctattgcttgatccttttcaacggcccccataacgtggcttggggtctcactactctgtacgtatgttggagagggcaaaagagaaaaacgtataatatgccatatactgtaaagcgccacgacagagttcaggtcgtagcatcgcagggtcacacaatctcggccacacccggcatattcagatctggacggcctggtgacatggaatgtttgtatatcattgcagactgcctatgcagtctggacttattattgggaacatgtaccttgtaccatgtcactacatataatgtaagatatacggagtacaatgcaagccctttccacctgtactgtgtctgacttgacggctccgatcctgtaatgcggcgcaggataaccaataccaagaagacgggacccaggccggccctgtatccaataatatatgctacctagatgcatatggagacccaacggaccacggcgtggcgaggtgaacctgaactccgaacaggatgtctaaccgccctcaggtcccaggccccaaaagtaaaaaaaaaatcatggaatgcaacggtggtatgatctaccattctagtcactaaaagacctccctaccaatccaatgacctacggggtactccgtactccgtactccgcaatgctttcataataatgggctcaacatgcctttcctacccaatccccgcacaagggaagaagcaattgccggcatgaaacaagaccgtgaaaatcacacggtcgatcacccaggatctaccattagcgtccacaccacatcgtacatacgttctatgttgtacaaggttcccattgaaattgcctctccgacagggatgatttggggattgccttctacgcgaccgaattagtatggcccccggttcgatgaatcactattgtgcagtcgaaactctatatataatatatacatatagttaaggagagtcacacacacacacacacacacatatatataactatatattttgtaccctgcaaatgcaaatatagacaatgacaggactaggcgtgtggatttcttgttggcgacattacagtggcattgcatcccaggaagcgatccatgcgatgggcattgatctcgtatgtacagagtatgtcaccatcagcatgtgcctgggatgtgggaggctgggcatgatcagacccttgcccaaccctccccgctcccatggtgtggacagagtacggaatatgtccgaagtagttgattgcatacgttgtacttgcatacgtagtgtgcttagtgtgtagttgggatgctggatgtgcaggaaatcgtgggcgagtggatcccgagggatcacataatcctgagtcacccggttggaaaatgatatctcaacggttgcgacaatgaatccttccgaacaaagacccgaaaccacatccgaaggattagggtggaaaaatagaaagctaaatgaaaggaagaggtggacgtatgaggcccaaataggcaggaccttaatcaaagtaatcaaagactgaactttattcttcttgctacagtctacggatcacggaggtatggagtatgtctatggagtatgtactccgtactccgtactccgtccgatgtatattgtaacaatataggtaagtaccgaggcaaaagtcgaggtatcctagttaatgaaaccgactatcgaggactaatcagacaattccttagactatgcgcgggtatatggcttcattcggatatggctcatgagtttagcgcagggaggtttctcgggtgtttcatagctccagtggagcgaacggagtgcagatcgcagatatccagatagatacgactgtagcagagacatagactcatcgggagggtcaatgtggtccagatctactgatgcactgaggacgggtgtgaaaggggtatacataaacagatcaggagcaagcataactccgtacggagtattccgtactccgtaggatctacgaggatgacgatcggtcaggtatcacctccctaaaatagcgatcaagcgcatgggaagagctccattgctccattgctccatgttctccattttttcttttccaaggcaaaaatatggaacccccgacatggtcagttcacacagaagtgtaaccgatgctaggggccccacggccgatcctacacgggggttataccgaggcgggaaatcgtaccccccggtacaatgccggtaagctccctaattcctgtgatcgcccttgacgaacacgttgtttcacacagctaagacatgccggattctaaccgtctctcgcctaacgccctttctggcaatgctccgtccacctagctgggactagtacgcttcggtaagatcctaccggagccctgatttcttattaagtgtttctcctgggcccggctccttggaagcgacagcccccttttattagatctgtctttttcgagacaatgaaataatatgtacaggtatattgtaggtgatcgctgtcgatcatccctcgtttagcgtcggttatacatatgtagcaggtaattaaggatctttgtttttgcttttttggggttgacattctattattacttttccccctgattttcactgtccaggttcggatgcggcttgctatacggcgaatacgctgatgacaatctacggtgtagaaatgaaatgtctttctctcatttttgggggctggaaagggatcagactgtcggggtatcggatcctgaaggagtaatccatacatgtactccattaatcaaatacatcctacagcagaaatattactccataacgtggttcatggcaaattgacctcgacatcatcagatcaggtatctgatctaaatctagatcccaaccaatatcccgataacacgcgttgcagtgatcagtacgttgcataagcaccaggggccaaatacgagtcaatgcgtatcaatatcgccattaggtggaggaccgcatcggagacactgcctaaacggtcgtcgcttagcgatggcgggcgatcatgggatgagtaagcgggagctatggccatcggctatgtctccccctgaagttggatcttcgttgatccaccgatcatctccgaataggaaggaggttagttgggaggatggttcatatgttgtactatgttgtcgatatcatactcattgacttctaacatgcaatcagtgcagatgaatcttgaaattgaccacttgggcatgggtatggaagcaaggtgttattcgacacgttcgtattactgggaattcaatattcaataatccaatacctgcatcaatagcatggaatatgtactccgtcctatgtacactactgcagtctttgtggcgggaagatcccatgcgaatatcctaatgatcggatgcagacaggtgcatcgggttgaatgccagattagggcttgctgccacgtgaaatggagaaaaacaaaaacaagggatgcatattaaatgcgtggcacttgcattgccaggcgcgttcgccgtccaataaaagcaccttcccaagtagtacaagcgtcagatcggatctaccaatcgccgatcggcgtgtaagaagcttccactggagtaaggtaatttacggcttacaaacttggaatgtacggcccgggtgttcgaacattgaaaccactttgacttttggaaattccgtcaaggttccaagactgacgcttggggctatttaattttaattatagtttaggatttcccttgatgaaacacaacacgatgtgatatgtgatacagcagacacaatgcgcatatgaatatgcaagtgccatgtgtcaaccttttcgcaaggcaaccattacttttatagtggatgtcgtgttgaacgtatacatctgtagagggcatatatggtacgcaagatatcacatctgcgaagatccaagtttgtcgcgtggctggatatgttccgccccactgatttacgaccattggcttctgccttcgcgtgggtgaatcgtcattccccccacgttaatctccgaaaagaattattaataattatttatctcgcttgcattaattttaatttgaatttattaaacctaaagaagtaaaaaccaattaaattaagctttggaacagactgcctctcattaaaaataatttaaaaagggaaaattaaaaaactaaataaaaaatgaattaaaaaatgtcgtaacgtaaatcgtaattttgcctgagtcggcagagtccgctggcgatcatggaaagccgcccgcctgctttctaggtataaacctcgtggcatcccccactcactgaacaaagctggacttggaacgcacctggatcaaacctctccatcacatcttcttcaccatggatctctccaacctcctctctcacagcgcggctgtcaagccgatctatactcctgtcgagtccagttactataagcgctcgccgcctctgtcgccgccagccgaagagcccaaggtctcattgccttcaatctcgtctctctttgagggtgctgatggtgctcagcacgcagctagtaagtacttggaactatattgcaaccccaaaacagcctcgctaaccctaaaccttccagagcgccaacgcttgtcaccatctctcggtgaccgccatgtccgggttcagtcctacgaactgcccccaacaccacctctgcgccccggctctggccacgcccaccgccgcgcatctcccgtggagtcgctgtctcacaaggaagcacaccagcatcaccttcaccgttcctctatctccagcaacagctcagtccacatccctcgcaacacagtaccctacgcctcgcctgtaccaagcgtctcatcctacacatctccagtcgacgctcctcaacagccaatgtactaccctcgcccaccaaccacatcctccttccagccctcaacaccagcatcagcaccccagatgccccctgtccaggtccagacgcagcagccgcactcgcactctcactcgtcttcggctctcatctctcctgtcaccccggcctggcaacaccaccactacttcccgccctccaccacagccccgtaccagcagaaccacgaccgctatatctgccgtacatgccacaaggctttctcgcgcccttcctccctgcgcatccactcgcactcgcacactggcgagaagcccttccgctgcacgcatgccggctgcggtaaggctttctccgtgcgcagtaacatgaagcgccatgagcgtggctgccattctggtcgccctgcccctgcccctgctgctactgcgcttgtcgtataggcggttgtgaatttgttgtcttcgtcctcttctgattcttgtcatgttatttttcttaaaggtgttttttcctttgtcagatggggatttcttttgtttggcgttgtgtgtgatgccgtgataccctggatcttggttatgattctttctatcggattcccatttggtttagatgggtcggttctatacactatataaacttacgattctcaatgtacattctatgatgaagactccttatgttttatcctgtagtcgtcttagtggcgtttgtacttcttatattcgctctttatttgacaagtcgatgaccctctggcaacgcatcaacggtttctcattcggactgctccgatcatgaactatttgccgggccagtttcaagggatatccgttagcttgtaaatacccattgttgtctatctgtgccctaagtttatcatcaaatcattaccaacataactttggaagtttatttccaaataaccatgtatcttcccaatatccaactcgcaagtaaacactcgaatgagaataaaactaaacataaacacatagataccaaaggccttctgaggtctactcatccaaaacccccctcaccaacgcagcaagactagtctcataccgcgcaggattatgatcactcagcatgccaccagcgaagcgcagctcaccaaaccaagcatcaacatcccggataaaccgaatctgcacgcgagtcgcaggcctcccaagacgcggatacccatcgatcccgagctccggcgccgtgaacgcatcacgctgcagaacccgcattgtctcaacgacaaaaacctcaccgggcggcatgagtttcggtgcacgcatctcatcccgcagcattttcaacgtcttccaggcccaagcgtcttcgccgaccccatcacctgcgttgacgaccagcggaggctggttgacgtagaatttgtggatgatgctttggcggagggaatcgctgacccgttggcggatgtgcgctttggcgcccgtggcgtcgtctttgaaggatacggacgctgtgtgcatgtcgtgcaggattcctaacgacaggctggggactatgtctgagccattgacgattgttgtgattaggcctcgtgtggcgagtcgtaggaagggggacatcacggctgggggcccgtaggcgtagacatggattggtcgattcgctgggagtgtgtattttggtgggctggggtctgggatgcttggattgaggttgttatctgcggtcaagaggcggggacgtgtggcgggttggtatgaggctgttacgaaggaggtgcctgctgtggaggggttgggttctgaaatcatcgttgcgagaagggctgcgacgcctccgccgagcgagtgcccgcataggactataccgtagtcttggaattcctctagtgccgcacgtagggtgatcatgactcggccgccgccgccctctaggagtcgcttggctgaggcgtgcatgcctttgtgcaccttccagcttttgccctgccattcgaggtcatcgtaatcgcaggtcatgtctgtgaggatgtcttcgaagccccatgtccctcgtagagtgagaaccacggctttggagtcatggtcgatagaaaggtagtgaaccaatgggaagcctgtctctgtctcaccagctgcgttcgagccaccagctggatcgatgaatgacgataggaggatcgtagagggtggaaggcctgcattttctgagaacgcactgtgctcgtgaccgtctgacttcgtactaggtagattcttcgagtcacttggaacacccatgaccgtgagcgcatttgagccatatgaggcagaggagaagcgcgagaaccggcgaatgttttgcacgaagtgtctctctggaaaaatgcctggaacatagccatcgcgattgagtgcctggatggtttccatatcttcatatgcgcttttgcgaggccggtgcgccagcagaagtgacgtctcagaccctgcagtcgctagggaatacatgctaggggtgaacgaatgggatctgcgatgcatacctgacgaaccgggacggtcatcattcgcagacaaagtcccgtccgcttccgatcttgtcacagacatggagctgctgctgcgaacgtgagtctggaccgcggtaggcgatccagagcgcataccagcaccacggcgtgaaaggaatgtgtcagtttgagtgaggagtgactcttggctcttctctcgcactgcaaaatgtccccctcgtgggcccctagaggcaggcatttcgtgagacgggacgtgtttcgtttgcgactgtggcgactgcctttgaggggagtctggaaagggcgaccttcgtagacccctgttcgggacaggggttgtcggtcgataattcagaggttcggtcagtctcttcttgagagcgggtctgctggagacctctcgtgcagtcgctgccttcacagacgccgttccttttgtagccctgggaggtagacgagggccttggatccccgagggttcgggcgagtctatagatggtttcttttccagtggctgcttggtctcatttctttcaaggccagccggcttaaccttctgcgcaaattttgcgaatgggcctttgctaggtgcagacttgggaggttctttcggcgagtcgggatttgttccacggtgcttgagagcaatgccctgtgtggcatcgggatgtgaacgcgacagatcatgatggggcctcgtcgaattattggacgatggcctgcccggcaatgctcgtttatgatgatccggctcaggtagggaaaaatttccagagtcgtcatacggccgcagctgagtgctctgggatttgttgaaggctgtcctaaacaccacagtatgcctgggacaccgtccctggccatcagcatgatcatggtggaatctctcctctatcaatttcgttccaggcggggcagcgatctctgccatatcatcatcgtaaatatcgacggtgatcgttcgcgccgttaaggcttccgatctgatagatgcgtgacagccctgaggaagctggctcataatataagcgcggatatcttcatcggacacttgctgctgaccgtccaaggggatagagaggcgatgtccaaccgaatcagacacgctcgaccgtcggactacatcaaaagcttcgtcgccatttccaggcatcacaaacgaagcactgccaggctcaactaactcttcattattgcgctcgggaaattgcagttcatgtgatctgatcacgtctgctcttgcgccgtcatccaggatgacaacatcccaaacaatctcatccccaccattctgccgcagatgtctctcggtattcttcttaccccaacgctgcaatagcgcgaagcctagggaaccgatgagaaggtctccgacgccgatgttctcggtacttgcgccgggttcaagagatctaaactcacgtcgaatcagcgtgataatagccgcaatggccctcgaagactcggtggatccaagaatggcatccaaagtagatagaagtgcctgcgagagattcgcaaccgaagacaaagtggtcgacgagaaatggaatgtcgctgcggcgaaaaaagatgccgaggtcaccgtcgtgtggagcgtcgccaactagggggtgttactcaagaccaagttgacaggcctagagagtccagcaacatacacttcgctccagaagagactcggcttctgtcctaccgcgatcatcgccactacgaatggcgacatctcttcctgccctcgtcaagatgccctcgactaaagcccggcttagttccaagctggtcagtgtcgtggctcgcgcaccatctagggccgccccgccaaagaatgtgcccagccgcaacgataacgaggtcgactgggtaatcaaagatatcaacgacgcgactggtcgcgggagcagagtcgaccccgtgggaacgtgagcgtgcgcatggtctaaattcgtctcgacatcggggtttccccggtcattggacttggtaaacatatcaagaataagggatattcaacccataggattatttttacattgacagtgtgttccctccatgtaggttgtaggttgtaagccaagttggtagcccaattactgaagatcggcctttcacatgtgatcgacttccaagacttctatacacgttactatgtccgattctacatcatcgctttcacgtcgcctccgtattgcaccttgcgaatctgactccggtcgcaatctttgaccctccgaatccccgataggcccatgttctgccacaaatcggtcagaagccccttgagaacctgtctggccccgtctcggccctgaatgctcagtccgtaaatcaccggtcgaccaacaagaactgcttgggctcctaagcacagtgccttgatcacatccgaacccgtccgaatccccgagtcgaaaagtaccgtcattttgtccccgacagcatcgactatttccggaaggacgtccaaagacccgatggcaccatccacttgacgacctggacggaaattagagaagaacatgaaaagccgatgaaagaagcacctaccaccatgattggaaaccacaatcccctcacagccatatttcagcgctagcctcgcatcctccacgtgctggattcccttcaacacaatcggcccatcccaattcttccgcaagaaagccaaatcctcccacgaatgcggacttccagcgaaaatgccaccgatccatgcgcgcgaagcaccgataatgtcgtcctcgatcttcgatccagtttccttctcgaacttcgcgcggaaaacaggatcgctaaacccgacctggttccccacccccttgataaagggtacgtaggcgttatccaaatcggccggtcgccacgccagcgaccaggtatccaaagtaacaaccagaactgagaacccgttctctttcgcccgctttagcaacgacagagtaatgtcgttgtccttcggccagtacagctgataccatcgtttcccgtccttgttggcggtcgcaacctcttcaatcgagctcgtactcgccgtgctcatcgtatacggcaccccgacttcctcgcatacttctgcaaggcctgtttccttgtcttcgtggaagataccctgtacgccgaccggtgcgacgataaggggattgtcgtatttctgaccgaagagctcgactgaaacgtcttgctcgggtgtctgggtatgtcatcagtcagcgagaacgtagtcgtagttcattgcgttttgccttaactaacatttcgcatcattcgtgggattctattggcctcgtcagtggtttctgatcatcgtggtaaacgtctgtaaatgtctagaaactcacagcttccactgccggaatgccagccgattgctatccattgttgctttctcacctgctccgccggcgacataattgaatgcgcgaacgcctagagactctcgagcttgctccactagcttgcggggatcggtggttacaccaggcaggatgctcattaaggcacccttgccgtagatctccgtttggtagctaccgtagttatcagacattgcaatcgttgtagatcgttggaaattggaaggttagagaaacgaagttcgaagctgggggtcagctatgtccccggtgatgcggaggtgaattgaaccgaggttacatggcttcatgcattcaaatgttaacaacacgttgcgcaaaatatccggttttatagtcattgtcatttcataacgcgcagaaagtcaagtgaattatagctatccatactttgtccagtagcatcactacttcgagctctaagtcgatcgccatacccagaacaacaggaaccgacctcgggagcagccaataacaatagtaaagtcccatccataacccggcgactgagacatcctccgatggaaaagaggaaatccggaccccttcaatccacgaataatgtaagtggcacctgtcgcactgccgtatacaaagtaaaagcttcctgcagatatgcactggcacaccgaaacagaatcatcacagcgtaggcgaacagacccatgccaaaaccggcataatccaatgcctgacggcctgcgctctttatctgtaccacagcagaccgaccggggcgaggatcgatcccgggaacatgaggactactctgaattcttttggccatgtttcgctgggctccgtagattgggttgcgagagacctgcataccccgtgaatcaaggaattatccgtttcccagagcaaggccccgtaagtcgaagatagacgtcacccagaatgcccggtgccatgtcgtgtattgtgtggtaaacccaccagcgacagccccaatagaaggcccaaagacatacacaagattgtagatggcatactgagtcacgctctttggaaaacagtcgccgatgataccagcgcccacctacgtttagcacattagagcaaggcctggccgcagaagaaggggcatactcacaagtccatctgagcatcctatgccgctgagtagacgagaagcgagtaatgcccctttatttcaagcgacccaaaacatcaggttgaagaccagggtagaatgaattccccgagggcaagactgtggctcgtcgaaatatctcgttcaatgggcctagtatcagagggctgagacagtatgtcgagacgaaggttgggagtactagaactgcttctatgagctgaccatatgcagttcgcttttgacagtgctcaatcaggcgcacaatcgatgaaggcagtggcattggaatcaccgaaggagagaaaacaagcgttacgttccatttgtttggcctgggccagttcagtggggttgtaggtgcgttttcttccaagaccatggtcaagtactggtgggtttgacatatctcattacagacttggtgaggattgccatttggaatcggctctctcatggcctcagtcaaagatatgcactggcaatatagaaatgtcgaagggcacatttcttcaacttgagccagagaagtcgacggaagccagggttttgatattagagcggagtggacgatctttgtcggctctaccgacttcgacccgactgctcaatccagacaaagggaaatctttggttgcggcttttgatcaattaaaataagttgattgctaatcgcaaagaattgcgcgccagctgaagaatcaagaacattggtgggtatctcaaataaaacaaataataaacaaacgcgcgcatcaacgagaaggatcttccctccacgagataatcacgccgagttccagactttgatagtcatgtcatcagatgtgtaaactgccattttctcgtcgcacgataaagtcatggcccgaacccacccagaatagcccgttaagactcggacgcaggcaaactccaatgacgcagcccatacgcggattgtcaggtcatcggccgctgatgccagcaggctcccatcggtacagaatgtgataacgcgcagaggtccagagtgtccccggaggacgttgagcatggcgccagaactcgtatcccagatgcgcaggtccttgtcttgcgatcccgacgccagcagcttcccattaggagagaagcagacggctctgattgaggattgatggccgcttagttgatggatttcattgccggtggttgtgtcccagatgcgaattgtattatcgtccgaggttgaagcgacagttcttccatcaggcgaaaaggccacagcgcgcacccaacccgagtgcccattgaggtttttgagcagcgaacccgagcttgcattccatagtcgtacagtgaaatcatctgaggctgaagcgagggtttttccatcgggggaaaatgctaccgctcgaactttaccagtgtggccctgcagcatgcggtaggtgaacccggtgttcacgtcgctgatacgaatggtcatatcatcggaggcagtggctaagaatcggcctgtgggggaaaatctcacagagcgtacccagttggaatggccgttgtcttttgcggcgccgcgctggagaccggtgttggcgttccataaacggatcatcatgtcattggagactgaggcgaggatttggctattgcctgaaagagccacatcccaaatgaagccagtatgtccatcaagagttttggatgcgactagcttcccaaaggaaggagtgactaaatctgccattggttgaagcggtacttttttgatttggatggatttggtggtgcgagacccaggagaacagaaagtgaggacgccgtcgttccagatctccttatagcggaaaaaggaaaggaaaaacaccaaattcagtagtcgtttgcaaaggtctgtaaaacgcgtggacatgaaggatttctcatagtgggaagtgaagtcatgagagacgtgtgtctgtcagcagtgcattgcggggtgaacagaattgcagggggaaaaaagtcccgttcatatcagatatcaatcctaattgaatatggtgcagaaggaatcagaaagtgatagtccctcccgaggtctttctgctgcagcaaataataggcaaaaatgacagcggaatttgctattaggtaagctggctaggccggtccacgggtctatatttttgatctgctgaccttcctattttgctctgtcaatggagaactcttataccagaaaaagagacttgctatccacggatagatgtagaatgtcccactggtgtatctaaacctactaattagggcccaatattgggttttgacttgcattggcttcatgttggcctcaggcgccgtcttacatcatcatatgcgttggaaccttccaaggaatcccgaggtcagctcactaacatctaacatatatgtacatatactcaggactacctacacaggattacgcagctacattgaagtggtttaatatatcgatgatatgatcatgatgcaaaatctgaataaaatcctaaggaatagaagaaagaaagacataaaacacagttacctaggccataagtacttctcttatcaatcggcaagggtcgttatccgaattcttggcgcttggcaactttaattcttccttttcgctttttgcctgagatttctcccttgaccgttggaacataagcgaagtgaccacgggaacatataggcccaggggccgagtccattcatctagcattctcttctatctgatttttggcttctcaccatgagccatactgagcctgacaacggttcatctaatgagcaacatgtgcctgatgaaatcagcttagggccaactctggagggacagatcgagaagactctgatcaggaagatagacctacatattcttcctatcgtagtgttgttgtatctcttcagtttcctagatcgaggtacgtgcccagccctggaggtgggggtgtctgactcatccctttgcgattgcaactggaatcaaaaacattggctgacttgaatatgcagtcaatattggaaatgcgcgcttgtacggtctggaagaggacttgggccttgttggcaaccagtaccaagtctccgtgtccatcctttttgtgacctactgtgtatgcataccacgcaatccagtcaccgcgcgaacgctaaccctaatgttttagttcttcgaggtcccttcaaatcttgtcctcaagaaactaaggccatctcgatatattgccacgatctcggtgatttggggtatcattgcaaccctcacagggatcactcaaaattatggcggcttggttgcctgtcgaatcctactcggagtcgtagaagcaggtcttttcccgggttttataacctatctcactctcttctatagcaaacgcgagattgccttgcgaacaagctatctgtttagcagtgcagctattgcgggagcctttggcggtttactggcttatggaattgggttcatggacggcatctgtggacttcgaggctggcgctggatcatgatcatcgaggggattccgacggttctaattggcgtggtaacttggttcgccttggcggatgacccggacacggcttactatctcaacaaagaggagcgggcacttgttgctctccgccggagtcgttatatcggccagacagagtctgcccagaagttccactgggctgatgtgaaagagggtgtcttagactggaagatctgggcattctccattggccagtttggtattgataccatgctctatggatatagtaccttccttcctactattatcaaaggcatgggcaactggaccgtcgccgaggtccaggcattgacaatcccttgctatggactcggtgcaattgcatatctgtgcgttgcctggttgagcgatcgctcccaacaccgtgcatttttcatatgtctcttctgtgctatctcagttgttggctatggcatcttgatttcggactcgtcctcgggagtccattacttcggtgccttgatggtcgccctggggctttacgttgctgtcggtttacctctcgcctggctacctacgaacctgccacgatacgcaaaacgcacctatgccacaggcttgcagcttacctttggaaacatcagtggagtcatgtcccctttcttgtatcccaattccgaaggcccgcgctttgtccgtggtaacgctgtcactatgggtatggtggcatttgcaggggtcgtgtatggtgtgatgtgggtttcctatcggtatataaacaagcgcagagcgcagggtctggaggacgagaaaatatcatcgctgtcggagcaggatatccaggaaatgggtgatcgaaaccccaggttcttgtacagcatttaaatacccaagctggcctatctccttgtttgtgaatgtgtcttttcctttgcatgatatctcttctgcatactacagcggggcataccaaaaattttcggccattaagccgccacagctcaataacatttatctggtcctacgaactgcacatgattaatgtcacatacacagctactgcattttctattttctatatgcatcgaattcttctcgaggccacacatgctttgctgctaacagccagtgggagtgcatctaggatgcgaatttcatggggaggaagaggtgtttggagagagagaggggtggcgggggggggggnnnnnnnnnnnnnnnnnnnnnnnnnnnnnnnnnnnnnnnnnnnnnnnnnnnnnnnnnnnnnnnnnnnnnnnnnnnnnnnnnnnnnnnnnnnnnnnnnnnnggggggggggggggggtgtttatactcgcaggtgggcacaaccgcgccttcctccggagcacctgccagatgctgtcaagcaccaaattaccggattaggctaccgctctgagaaaaataccatccaaccatctatggacgccatcaaaaaatcatgatgtcattcccaacttctccacgttttaagccttaagccttcaaacatcaacctttccactctgaagtccaaatactcaccgttgtcagatccatcaacttgatagcaatcacaatcaaaaactatgaagagctttaagcctctgaaccgggctttccaagcagccagtgccacctaccccacgcactcacttcctctccgcagcacctgttacctccaagcacagaaaatccctcaaacagaggacctcatccttgaaaggtgtattctcaacccctctcgggcggaaacctgccaatcaggtacagacgacgaagtcgggcgtcacaaatctccatatgacccgtccaaaacagcaccagagaaggaacacctcgcgttggaggaagaatacagattggaaggggatactattcacgatccgctttttgtcagtcctgcaaatagggatgtcagtcaacttttggatccgagggctggcatccatggtttacaacacttgaggagtgtcaagggctggactagaaagaggaaggaggcacttctaaggaaggcgccgtacgagatgaggaaatacgagaatgtatttcgtgagcttaggaagccgctaaaggtttgtgtttgagatcgatatgattggctttcttcagggctggctgacatggtcttagaaggtttgagtccaccagttcactatcacaaggatgttgtccactctttctcatagttaccaaattgagaacaatgatgtttcaaggtttactttgattagttcttgcacattgtttgtacacaagatattcaacccacgtcgaggcaaattttagcttagcccaaccaggactccattttcgttctcgagtgtcatgctaatcctttccgtccacactttagtattatagttggatacattcgaaaaggtctggaaaatgcgagccacaatgtacgtgagcacagtcatggcatactgtcctgcattgtcatcagttggtgtgtggaccatggtagcaagggaagaaacttacgaccagggcaaattctagggcccttattgaacgggatgaagccgggcatatcaccgcttaggtgttcccatcgctctgggtagaatttctctggactttccccaaaatccttccctaggcgatgccgagcccaggttgaaaataccacaatgtcaccttttcgaactaaaactggcgactggccatcggttcctccaccgcttggcattgtggaacgcttgtttgctactcttgcgttgaacacaactgcagggaaaactctcatcactttgcaagctatgggtcagtgtatgcttgatgctaaatggttggtcaagctttcctcaccttcctggagtacccagcgaacataatgcaatattccaagctgactccacgttggtggcgtaagcccaatggcatcgatgatgctagttcggagttttttgacgatacgttcgtcctgggataagcaatagaaaagacctgagagagtggtgctcatgctatcatttgcgagcagaatgctcattgcctggtcggcgaactgggagatctcatcgaactcgttgaaatcattgccagcgcgcccaccttttgtcttttcaatcctgctactctgtctttcaacttcccgcctggcacgagccattacatatttccgcgctctacagcacgactgataaaaagctcgtttaggcatcaaataacggagtgggccacggaaaccatctcgcacgatcctctctttgatgacatcaagatcgtctacgaactgcttcttttcgtgggattgagcaaagtcgagggcatcaacagactctccgagagagaaccgggtctgcatatccaaagcgagagcggaggtacaacgttgaacgtcaaagacctggccatttggtggaacatgttgaagaaaggcctggaagtgttgttcacataatcccaggtcaatgaccttgcggaggttagatagccgattccgcaactgctcccgacttctcttccagtctgcgccgtcgagagtaaaaatcccatgtggagtgattggctcaaacaggggtttccgcaggggagaactatcgaaatcggcaaacgcggtggacaacatatgtttgatgttttctgcactgcaggtgaaaactaatcggtggccgagaacattggaagaatacgtctcgccatatctctggaacagtgaatttgtatagaggagtgatgttcgctgccgaaagtgagaagccaatttcattgctttcaaaataccgaagacgtcatatcgaaaatgatcgctttcaccagtgagcttctcacagccatacagtcgttcaagtgttcgcagtttttggatctggtatagtcctcgtgccaggagaacaatcgggattccaatgcaagctaataaaatagtctgcgggagatttacttgcccggtagctcctggtgatggctgaattgtcatggttgagatattgcgtcggtccgcagataaagcagtagtcatcgacagacggcacatgtagcgaatcccccctgggtctgactgtctgctctttgcaaaaggaataaaacatttaaccgatcagatattattgcggggatgatgtgtcataatattgtataaaactgtcttgtcaaggtccactcgaagacagatcacgctgcagatatattgctgccacaccagcacacatttttgctttttgaactaatgcagctacgagaaaaacaagagctcaaaattcccatttattctggtccaagattcgcaagcagattggcaatatgtataaaattcacttatcctgatgtacttcaatatttatcttgcaggttgcacaccatttcacactcagcaattgacaaaagcacatcatgagcatgacttcgcgagaagaccatgatgcttcttcccttatttcgcaagtagagcatgcgttgaagctttcaaatgactatgctctcgggttggtacatcctgatggtcattggtacggcgagatgaataccaacgtcactgtcactgccgaatatgtcttccttcgacaggccttgagactggatctcaaaaccgacatcgcagcttactgccattacctactatctcagcagaatagtgatggctcctgggggctagcacccgagtacccaggcgatgtgtcaacctcgaccgaagcctacctggcactgaagatattgggaacaagcccgcataccccagccatgcggaatgcccgagcatttgtgttgaaagcaggcggaattgcgcgcgtgcgcattttcactcgtatcttcttggccaccttcggtctgttcccttggagtgcagtaccagagcttcccgtggagctcatgcttctgccatccatctgcccaatcaacatctacaagtttgcatcttgggctcgcggtactattgctcctctgttgattatatgtcaccatcaacctgtgtactcactgccgaatggaaagtccacggacaacgactatctagatgagttatgggtagattgcaccaacaaaagtgtgccttacggtctgccactctgggatttgatgtctcaaggagaatttgcagggctagcatttggtgttctggacaaagtgctctaccagctgaacggacttcgttccattcctcttattcgagcatacgcccgaaagcagtgcatccagtggatattggaacgccaggaaaagaccggcgattgggccggaatcttcccgcccatgcatgccaacatgtatgcgtttacgctggaaggctacaaactagacgatgacccggtccgcctgggcttccaagcattggagagatttgcctgggaagacgaaaaaggaaagagaatccaagcctgtgtctcacctgtctgggatacggctttgatgacgattgggctgtgcgatgctatgtcacccaataaacagactatcgaccatgctctcgcgtggatccgggctcgccagctgcttgaaccccgcggagattggcgtgtataccggccccagttagctcccggtggtttcagctttgagtacgagaacagctggtatcccgatgtggacgacacagctgcgattatccttgctcaagtgaagcacgacaatgggtctattggctccaattctgtaattgcagcagccacatggattctgggtatgcagaaccctgatggagggtgggctgcctttgatgtggagaatgataaactgtttctcaataagatacccttcagcgacatggatagcctgtgtgatacatcatgtgctgacatcactgggcggatccttgaagcctacggtctgatgatgatgaaatatttttccgcaaagtctgacgcggatcccctgttgcacaccctacgtgccgcatgcatgcgcggtatgcattaccttgcttctacacaggaacccaatggatcttggtacggaagatggggctgcaattacatctacggtacgagtcatgtgctatgtggtctggcatatttcgttgagaaaagactagtttgcgtgatggttaaatcggctctgcagtggctgaagtcgaggcaaaatgacgatggcgggtggggcgagtcacttctatcatatcaatcgcctgaccgagaacagcaggcctccacaccatcacaaactgcatgggccttgatggggttgctctctcatcttccagtcacagatgatgctattgagcgcgggattcggtacctggtatcctctcaaagaccagagaaaggcattggatcgtcgtggccccaagcggaatatactgggactgggtttccaaaccatttctatctaggctatgactactatcgccattattttcctatgatggctcttgggcggtatctacaaggaagtcgtggcttgaactgaagggggcttcggagtcaaacgactactccgtactcatggttgaagattgctttcaaatattcccaatatgcttgccgggaaaccaaacccgatcgaaactcgtcctaaatcccagaaaaagggcctgcatgttgtagtcagttcgagagaagtcatatgcagtgttgtttcagacatgcgtaatgagcggcccatggccttatgacaagtgtctgtttcccaaatcggagccaaagacttgcggcattctaatagatatgtgactggtacttgcattagcgctgggtaaatgcaataatcatctgcagtcccacggagtagactaggccctccccaaaaaagaaaagtgactagcacataaatcatccgccccaattcatatcacttattttcttgtgactcttcagatccatgtgttaacgcccattgtttcaagtccggaataaaagctcagacttgatactgatgcttatttctcatgtcacctatgtacaggaaaaagcaaactgtaagtagatatggtatatccgagctacctatatttgcaggatgattgcttttttcggcagacctacatagcaattcaagggttctctctcaaagaacagactacaggtatgcaagctatattaaaagataatattttatcgctaatttcatctcacaaatctttccgctattttgcaagctaaacacccacctctcattagctgtcagagatgagctttttttctacgttctggcgtaaacgcccagaaagagtgcctaccgatcaggttattcctctgcgatactgggatgacctggattacctacgttctatttgccatgcctttacattccgctttgacgacgccctggatgcgtccaagctcgaggcagcgctaggacgactgattgaaatcggagattggggtcaaatcggggctcggttgcgccttaatgtatagtctttagtcttccccaaattcgatcatgcaaacacagcataacgaacaatcacaggatcatggaaaactggagtatcacataccagcacgttatgatctactactacatatggcatcaacataaacgatcaccccttaggctcccagctgcctaaggcaggccaagatcagtccttcttgtcaccatcttccgatttctttacctctatagtctgccgcccagacagtccccgagagttggccgactggatctacaccgaccgtccacaactcgatatccatgctgctctcttccaggatgcaaccctgctcacaatcagttatttgcataccttttctgatgctatttcacggaccaaccttttcgaggcttggatagctgtccttcgtggccatgaagaagaggtgccagcctttgttccttatgaccatgatcctctatatacgttgggaaaagaagcgcctagacagagctaccgcaatctcaggcgactattgagcgggctcagccttgtgatttttgggcttcggtacatgttcgagattctgtggttcccaaagttggaagaacacccgatccgccttccaggacggtgcgtggacaaaatgaggaaaactgtactacaggaactggctattactgcttcgaggggaaccagaaagccgtttgtgagcgagggtgatgtcgtggttggctggtgggtaaggacaatgatcaaagcgttgaaacctgcaccggaccggaccatcatggtgatgaacgtcttcaatgtgtggaatcttttcccggaatggttcccccatggtgccgcaggcctcgtcggcaattcattcttctattcctacacgctgcttgttgcaagtaaagtcctccaagatacggacttgaagtatgtggcgtccacgaaccgcacggccctcatggagcacagaaccaagcagcaagttgcggccatgactgccatccagagagagaactttatgaaagcagcgcctgtggttggagattcgaagcttctcttcatggctgctactaatcagcacaaagctcgatactttgaaacggattggtcggcggctgttattgcccccggcgtgcccttaagtggaaggccccatgccctcggccgaccatcttatgttaacgacattgagtattgccgagggtacccaactcgtaacattgtgaggattattgggaaagatgctgggggtgattggcatcttttgttcaaggctagagccggcgcatggcgggtgattcaccaagagttgatagatctgatcgagacagacaagcgggattgatatggttctcgacacgtcatactttggttcaaggcgctggtttcaactgctatttagccactcacatcactctgtatttgatatggtagtgatattatagtgagacgtgtctccagagctaaatatcctacaactacgaattccatatggcttaaagatgtattatattggccattgtccctgtgtgccatgtgggactaaagaccctgggtggctccttatgcgcaataggccttactaccggtgccgtaggtttccttcgttacccagacccaagctggatagctgcattatgtctatgttacttctatgacatacaagcatacaaatgttggtatatcttacataaggccataaaaccaagttcagccttcaggtagacaaatttcccatgaatccccgtatcagtcgttccatctccccgggggcctcggttggtggaaaatgccgaacatccttgagcacctctagcttgcaggacggcatctcccgcagaattggagtgatcagttcttccagaacagccggatccttctccccgaccaccatcagagcaggaaccttgatcatggcatacctatcgcccattgcaaagctcaggagcgcattggcattattccgacgaccatgagcgggccattttgccgcttccagggccgtgactgtgtccagccccatactggtgtaaaatgagacgcattggctcgggatttccacgccagaggtgagaatctcgtgagacagaagcttctgcatacgctcgccgtcataataaccccccgagtagataatgcctgcgacacggtccggatgggcgaggtagtatgctgcggcgatgttacagcccatagaatgggtcacgagcataatcctgtcggtgacgtcacacgcttgcaggacttggtggaggttagcggcatgacgggggatggaatagctgtcgggagatgtaggcttggaggagcgcccatacccccggttgtcgtaggagatacagcggtactgcgtgtgcaaatttgcgatcaagggttgccaaatgttgtcgacaccgaagtaaccggatacaaaggcgatggtgggacctgtggtgccgtgggatcggaaatagatttcctggccgtcgtcggttgctgtgaagctcataatgatcaagataaaactgagatttgactgtaatattgtcgatataggttctgttgcccactttatgtagagaacagtgtcaagtgggatagtgtggatagcatttcctatgaataagcatttggtcagattttcgtcgatgaattaattgacttgccggtgggatgaagtttacaaatcagctccacgcacctgggcagacttcagtcgcattacagacatggagactgtacctgtggtagatagctctcttttttctctttcccatctttcccgctccgttacttagtgaatgcagcacagtctttgtcttcatagagatccttgtataacagtccgtggacgtcaacttgagccgggtctcttcgtttatagtatttttcacctttctctcttcataacagcacaatttcagagtgaacaggaacagtccttcagccatctggcagattttcatagtttctctccctcatcaatgactatctctctcctggtcgcacataataggggtgtgtctccagatgttccaaggttatgtgtatctgagattatagtagcatctaggtaagtcaatggtccaacatctaactgatccaaactaacttcgtacggtgatatctcccagtggtcactagaccatatgcctttcctcccatctctcgtacctctacagcttccacaatatcatgatcttgtgctttcatgttttatgatctcacctgctagctcgtaggttcaacaggaatctgcatagcacaggaatctaacagagccaataccaatgaactgaccacagatttggaacaatcctctcggagacacgagcactccaagccaagaccccacgccctgaactccgccttttgcccctgccaccgatatgagaaccgagtcaaaggttcaaatgcctcttcgagactttcgccgcattcaccttttccccaagtctgcagcaacagccccgatcttcaaaatcgcatactgggtatcatcctctctaactgaacgatctccacaagtcccgccgacgtacgtgcagtttgggcccggaggtcgccgaattagtgggtcgctcccctagcgcctccatttcaatctcggcatctcggcctcatctagtatacacctctacaaagtgagattcaatcaaattcaccagatcgccgataggctatgaggtgggttcaatgaatgcgcgtgtttggcccctgatagaaaaatatccgactaatccgtggctcataaatactctttgtataaatggctacccatatcaccttgcgactaagtgcagagttgtctccgaaaaatgagtgaaaagacaatgcccgagctagcggagcagtcgcaaaaagatgctattgtatcagattgggccaatgatcctgataatgcaaagaattggtcgacagccaaaaagctttacaacactgctgtgcctgctttactatgttttttgatgtaggtgtgcattccatcgtgtatatgatgacttcgctaatacaagaccattttccagatcattcggactggcgatctattcgccatctcatgaaagtgcccaagaggatttccacactaccaccacactcgccctccttccttttacgttatacgtgtacggtctcgcatttggcccggctgtctcggcaccgctaagtgaaacatttggtcggagattcatttatgtctttgtgactccgatagcgttgctgtttattctgggcgccagtttcgcgaagaacctggcgactcttgccgtctgccggttgttggccggtctcacgatctctgcgccgctggctgttggcgcagggactatcatggacatgtggacagggataaacaccaatcgcggcgtggtcttgatcatgaccatcgcatttctcgggccagccctgggcgagctggtgggtggttgggttgcccaatacaaaaactggcagtggtcgctgtggactacgttgttcctcggtgcaggtgtctggatctttgcgctgggagcccaggagacttatgcggggcctgttatgcgtcgcaaggctaagaaacttggcttgcccataccaccggcccctatcccagccggcatggctggagttcgtttcatggtcacggtcacactagtgagaccactttacatgctcatccgcgagcctattgtgacactttgctcactatactcctctctgaacttctctatcctcttttgctttttggcatgcattccgctaattttcagcaccacgtacaactttacgcccggagaaagtgggctggtgttgattgggattgctgtgggatgtgctcttggaggtatatttttgatcctcctggattcttatactttgaagcaacatctcttcaagtacaaaaatgccacaccaccaccagagcgaatgctgtggggtgcaatgttaggaggtcctctgatggcctctgcgctgttctggtttgcttggaccgcacggccagggatccattggattagtagcatcgtggcgacaggcctgtttggtttctcaaacattctggtcttcgtgggttcccaaaaatctggctgcattgattactacaacatggctgacaaagttatccctaggtttcgacaatgctttacctgactaatgtatacggtgccaaatacggagcatcagcgctggcggccaacgggctactgcgatatctagtcggtggctcatttcccctcttcacaattccaagtatgtcgctccgtctatttcatctggagggacatatttctcatatctttgtcagtgtacagagatctcggttacccttgggcctcaagcttgctagggttcttggcagtcgcgttcgcctttttgccatggatcttctacatattcggcaacaaggtccgtcagtctagtgcatacatcaaataacacttgcacatcatgaggcaaaggtcgctcagcacacactcatacatatatcccttgggcttggagctgtgttgagcgacgttcaaggtgcccattttaggaatagaaaccaacctaatcacctcactggttaaccgccgtgttcctactgagacaatttagcccataatgcctcaggactggcgttaacgattattttcgaatctgttcagaaagaccacctgttcttgccttgcttatcaggctccatctagctagttagttatacctaggtattatctagttcctactttctcgtaaagaatcaatcctccttctctccctcagctccctagaagccacatcagaagaatctgactgactccttgacaatgaagtggatagagaaactcgcaccatagcctgagacaattctgcatcgcgggttaggttataggacggaagttaggaaaacgctagccatctatgaatacgctattctgaaatagcttggcggatttgatatggtacacgtcgataattgatttgggtggtacattggactgtaggttggttgatatcatttcattcatctggagcgcttcagatagtatacatacaggagcgaacaattgactagctcgttgggattcctataaatgagttcaacttagactgacttcaacttggtatgatatatctacaggcctaaggaatgcaacagcattacaccaaattaagccattccacgaatcaggcattttccacgaactcttccaactctttatcgacaacaggctcgccacgggatcgacaaacatgggacttgaatgaccgagttgcaattccatcctgaaacatttcctcgatttgttccaatgtacgttgtttcatctccgggatgaaaagccaggcaaaagcaaacgatgcgatcgagagagccccgtaaatgaatgcaacccgaccaccaattttcgcttgggtgtaaggattgacgaacaccatgatcaagccagtgatataggcgcccaggccagataacgcaactgtcttctctctcacctggctgggcggcacctcggctgtcagaacccaggtcaatggtccccaagtgacctggaacgaaaagaaccatagcatcaacatcaccacagctgcaacttgcattttgtacgacatgctggcagccccgttggcagtcaggccgccgataacgagcatactggctgctaacataagagcagagcaagttaacacactccgtcggccaagaatatcggtcgtggccatggaaatgaggttcgcgacgacaccaataacgtataccaccacagacatcaggagaacttccttgaatcctatctgctgggggaagacagcttggtaatttgcgacaaatgagattccctgtgcctgctggaaaatctgggcacccacacaaattagtgtgcgacgccgatttactggatccgtgaagcaatcagtccatgttgcgctggcaagtcgttcacgctgcctctgtagatgctgttgcaaggcgactacctcagcctctgctgggaaggatagtcctcgtaggcgacgaagggctacgactgcctcgtcgagtcgtccgcgagatacaagccagtgaggtgactctggcaagaagggcagactaacccagccaggggcgggaatggcaatctgagcgaccactaccacacgccacgcccagtcgctagggatatgccggcacagatacacagtcagagcggcagcaagaccaccgaccatgaggaaagcgttgtatgtgccggacatcaagccgcgtaaggacaccggagcacactctccctggtaagcagggatgacgctggtggcaattcctccgcccaggtagacgataagcttgccgatgatgaattgtgcgtagcttgttttggaagtagactcgataacaataccaactgtgacaatggcactctgaatccaaagggtattctttctcccaagccgttcattgatgggcgagccgcagaaaattccgaggataactccaacatagccaagcccggtccctagtgactgctgttgagaggtcagggcccatgtatgcgtggcgggatcaaggacgccgaaattttgaacaaactgaggagagctcatcaggcttgcccaccaggcttggtcaaaaccaaacccagcggaagatatggagccaaaaaagaccaccgcccagataagccatggcaaatgccggattgaatcgcctgaagattctggttgtgtcatgatgaatgatgtcaatggagcagccgtatggatatggaaaagaataaatgattcgaagctgcctgggataaaattcttgggtttcaatccctacactggaggaaatcgatgccttttaagacacaaggagcctattaaagggctcaacttatatgccaacttcgcctggtccaccattacagaggcattgagcgaagaactagtccaatcgaatggatggacagaaatagtcgcctaactttcctaggattacttccgccctttggttataagaaggatggtggctttggtatcggtgggactcctgatgccacagtcactagcgggacaggcgtaaagtaagcaagccttggaaagacctcttgatgacaagttctatatcagcatggatattcagaacatacacatgatcaaagccactattgtcgctgttttcactatctttaaggtacaatttctcagctcgcccgcaatgcatgtctgcttccccgatctctatactgaggctccccacgaccgctaaaactgtggagttttgagtgcggggaccagaaactggagatatggggccaaactaggaaagattgggagagtcaaaggaaaaagatttacggagttcgtatacggagtataaaatgaggccccaccacttcgccgagtggaatatcagccagaatgagaaaagagtgttcggggatctgagtctccacattatcgccgaagctcacattgtactccatatagcagatggccttgatgaaatgtgatccccacaattacgaagccaatcaattcagataacgaataaagaacttgccattctcttgtaagcacattttgcacccgtgggtcttctatctctactcatctcttctggtagtgccataccgaaaaccactaaagaccatggcttccgatactatcagcaccatcgtcgaaagactcctccaatcgctcactctcgaagagaaggtgtctctggtggccggccaaaatatgtggcagactgcccagatcgagcgattggggattccgcctctccaaatgacagatggtccagcgggtgctcgaggcaccaaatggacagatggttctctgactactttggtgccctgtgctatttcactagccgctacctgggatccttcaatggtgaagagagttggcactgttttgggcgaagaaacccaccgcaaaggctgtcatgtgcttttagcgccaacaatgaatttctctcgctcaccacttggtggccgcaactttgaaggctatggagaagaccccttccttatcggtaccatgtccaccgaaatgatccgtggtatccaaagtgaaggcgtcggtgcttgcatgaagcatttcatcctcaatgacaccgaaacacgtcggttcaatgtcaatcagactattgatgagcgtaccttgcgggaagtttatatgaaacccttttttatggccctcgaagcatcgccctggacagcgatggtcagctatcccttggtaaatggtgtccacgcggatatgagctccttcgtcctgccgaaactgttgcgggatgagctgcagtttgacagactggtcatgagtgactggggaggctgcaatgataccgttcggagcttgatcgccggcaccgacctcgagatgcctggtccaccagttcggcgcggtcaacgtctcctcgctgctatccaagagggactggtcgacgaagcgcaccatttgaaccctagcgttcgacgagttttgcaactgctggagaaggcgaaccttctaccctcacaaccaacggtccagagctcggaagaggcatccaatgccgcagagttccctaagattgtgcgagaggccgcagaatgcggattggttctcttgaagaacgatggtcttctgccactccagccatcttcattgaaaaaagtcactattatcgggccaaatgcccgcaagccgaccgcaggtggcgccggcagtgcagccgtaaacccattgtacatcactacacctgaagaaagcctcaaacatgcccttcaaaaggccaatccagcgattgagatctcgtatgaacagggtgtgccgtttaccttgcgcccaggtctccttggagacgcccttgtcattcccgacggttcgaaactgggacttcaggtagatttcttcgctggacacgaattccaaggccccgttgtggcgacaacattttgggctaattctctggcttatatgatgagcgatggtgatgtacctgagtctcttaagggcaagccgtattgctacagggcgagtggagttgtcactcccaaggtctgtggtcaatatgtgttcagcattgcaaacactggcaaggcaaagctcttcttagatgataagctcatcattgacaacactgactggacaacgaccaccgggggcttccttggctgctccagtgaagaccggacatgctccgttgagctgagttctacccgttcatacgtcttgcgagtagacaatgtcgtcaccctaccgcttatggagtcatttgacaacacgctgtttcctaggatttctggcttacgcatcgggctgtctctacaggtggatgagacagagatgctgaatcgtgctgtgaagtctgcacaggagtcggatgttgccatcctggttgtcggtcataataaggattccgagggcgaaggcggcgatcgaccgaatatggatttgccaggtcggaccaatgaactcgtctcgtctgtttgcgctgccaatcccaacactgtggttgttgtccaagccgctagtgcaaccgctatgccttgggccgatcaagcgcacgctattgtgttaggctggtaccaaggccaagagaatggccctgccttggcaaatgcgctgctcggaacttgcaacttctctggcaagacaccgattaccttcccaaagaacttgggcgatcatggttcaagcgactggttccctgctgaagcggcacgggaccatgctgtctttggcgaacaggtactgatggggtatcggtcgtttgaggagcgcaacattgaaccactatggccatttggatttggcttgtcatacacatccttcacgctgtccaacatccaccttagtggtacattgactaccttccctggttctcatgtgactattcacgtcacggtcaacaatactggccagtgcgatggccatgaagtagtccaagtatatgtctcaccatcagtctgtattcgcgaaagaggtctggtcagctaccccaacaccttggctggattcacaaaggtgtgggtacctgcaatggaatctcgagattcgagcattgtcatcaaaagcgacgagttccggtggtatgatgaagaaatctcatcttggagggtagacacaggcgattaccgatgttttgtgggaaccagcgtgaaggacatcaagtgcgagttagctgttgaaattgtttaagcttgatctcgaaattgaacggctccttcaatacagtgctcgcacaactctagtatggtattctttttaggtaattctcgtgtactgtatggcccagataatagtatagacgaattcaacaactcggcacatcaccacggtcaagtaaggagtacgcgaagtgacctttcaccggatggcacctgggcacctgggcgcctgtctttgattacataatattctgccggtttatattccggctggatgaggtcctttcgaactatatggcggtgtagactctatataaaggcggtagggtcaacactttttacttgtagataacttccaaggttggtttgacattgatatatcttcgtattttggtcccaataacaaatgagtttcgatcaaaaaacccaacaggtgagactaggttgtctcatgagaagtctccctgatatcccacgcccattagaaatatccccggaaaatgaaggtaaaagtggactctccacggttttcgaaaatctttcgaaaaaaaactttttgtgggaatctcatcgttctccctgagacctcgccgaatttgtggggctttcagggggccagatatcatccatggatggtcgagagtcttacacttcccttggaataagcaactagattacccatctcgtattctggcgaagctaattgaaggttccacagctttggattccttcgaaaagaaggataagcagaaaaggccccgagtataaagtgctgaaagatggccatgctctctaccaaatcagctgagatacttcattctattttactaccttgcaattgcagcgacaatgaagccgaacctcctccttagcttcggctgcttggtagccggtgtggctacagatgcctcttacgaggattccgatatgtcaagccaggttttcgctgtatcaaagcccaacttctcttgatcatgaccgatgaccaggatctgaagttggactccctctcctatacgccgttgactatgaatcatatggcaaagaaaggcacaacctttgcgaaccactttgtcactaccgctctgtgctgtccgtcccgtgtcagtttactcactgggcgccaggcacataatacgaacgtaaccgatgtcaacccaccctggggtaagccagaacttctttttatttttctgatccttccgtttgatttacacctgacggatattttaggaggatatctcaagtttgttgaacgcgagttcaatgagaactatcttcccgtttggatgcaacaggcaggctatgatacctattacactggaaaattgatgaacggtcactctattgagaactatgacagtcctcatgctgcaggcttcaatggatcagactttgttctggacccttacacctatgactacttgaatgccacgtaccagcggaatcatgaaaagcccgtcaattacctgggccgtcacacgactgaggttctccgtgagaaggcaattggattcctagatgacgctatagctggcgaacgacctttcttcatgaccgtgacacccatcgcacctcatccaaacatgaatgggacgtatggaggtggtgccggtccattgtggatggacgagcccattcctgaagaacaccataaacatctcttcccagatgcgaaagtacctcgaacggccaacttcaatcccaaacaagtgagcgtctcttatcaataacatgtcaaattctggtacctactaacagaatccctttacagccgaccggtgtgagttggatccatgaccttccataccgaaaccagaccgtgatagactacaatgaccattattatcgccagcgacttcgtgctcttcagggtgtcgatgagctagttgacaatctcatcacacatctcgaaaaatcgggaaaaatcgacaatacgttcattatttacacctcggacaatggtttccatatctcccagcatcggcttcccccggggaaaacctgtggctttgacgaagatatccgagtccctttcatgatgcgtgggcctggtatcccagaaaaccatgtgcagaacactgttaccacgcatattgacattgctcccacgctcttccagctcgccgggcttcgtccgagatctgactttgatggaacaccaattccaacttctaaggccactggggatctccatgagcacgtcgcagttaaatattggggacaggcgatgctcgaaggtggtttgtcaaaccttggtaggtctgcgcattgcttccctcagtctatttaatgctaatacttatagggaaccccactgtacctaatcacacctacaaggctgttcgtctattttctaccgattataacttgttctactccgtgtggtgtaataatgatcatgagctctatgacttggctgtgagttttctttggcacaatgtaggtagattaacccagctgaccaaatgttcaaaagacggacccttaccaggtgaacaatctgtggacgggagatgcccaaaaggttgatatcctcgggcatccaatgtcggaagtaattccaagattggatgccctcctcatggtactcaagtcatgtcttggctccgagtgcatcaagccctgggatactctacacccggacggctcagtgacaagccttagagacgcattggatgataaatatgacctcttctatcagtcccagccaaaggtctcctttggtcgctgcgcctatggctatgagattgatgccgaaggaccccagcatgctctcagtttcagaaatggtacggtttagagatctgggtttgaatattgaacgtgtgtgccaatattgagcatttggtatataaaattggatagtaggtgctccaatgtctggtcccgagggtaccctcggacgctgtcatggattgggcaatctatatctccaatagcatttgctttcttaggcccatcataaaacgtaccggagtttgttattttagttgacatacctatatagaatcacagttgagttcctgtacctaatctaaatttcggtaggtgtctctcgagggtatatgcaatcatggtgctaggccaagtcacgttaatcctgattattcaagcggagaatgcgaccatgactcgttggctttcaggtatctgcaagcaaagatggaatataaaatctaccgtaccaatgtccctttcgaaactcactagttgcttcggaaactcactgtactggctatgcccagatgccaagttcgccgactagtgggtccactggacccacggcattcttggcgtgcatcgaccctcccgcaggcgcaggtatctccaacggcaaaggggggacacctgagattacagcctttacacatttgccatcctggcactgaaatcatgtgatatccaatggctaagtgaaaaggagaataatggttggaagcaatcactttttgagaatagggggaataaacatagatccaatgagttcgtgacctgcctcggcagaggctgcctcaacctcgcgtgtggtggctcggagtgttcccacagaagaggctgcaatctcccatatgctgcccatagatttgagaacacctatgttcaacgccaagtatgagtaatgcttcccaaatggctgcccgataggggcagccagaacagtcacctggattatagagctgaggacgagagtacaagcaaaaaaaggagaatgacctgtcacggacgtagaaagagaggcgagcttagaaagttcaacagctgcgttgacaattttcgctgtgtgtgtttgggcattcggcgagggggatgctataggtggaggcctggaacaaaacacctcgccggtacttgggaggaaggagactaagaaggatttcgggaaatggaggtaaatagaggcgcattgcataatcatagccgactggaagtcaacttgattcacttttccatccatctggagaatagtgctgtggtcgctgggccatcggtgaaaccaagccgagatcattgaatccagtacctccaatgtgtcttcactagcgtgtgtctcgcaggcgataaggcatcgtcggagaatgagtgtcgcctcgacacgataagcgagtgctgagatgcgatcatcatcagagaatgcccggtggcccaggtccttcgcagatacaaagaagaccccagggtggccgcccaaaaacttctcatcttcagatggcagggacacgtcaggcgtctccatgttgaactgtaaagtccctccaacttgcacggcagcgagtagagtatccacggtgaaaatctcccacaatgtccgcctcatgctttcagcacgagcggtgttctgtatctcgacagtttcggagagctcccggcaatggagtccgagcctgaagctacattcaatagccaagccaatgcatttcttcgcgcattcaggggctttacggccatgaaataggatgctcaaaagaagatacgattgcgctttttccaaatccagtccagcgttttcagtggcagcccaaagatcgtctgaccactcgggggtttggccaggtgaaagatgatgcaacccaatgaactcgacgatgttaacgagatactgaggtggtgaagacataacccagagatcaaagggcggcaatattggatgcgcagggtgaaagtactcgtagaatattttaatcaaatggattctcatttggggtaaattctgtggaggctctggcatgtaggctggggtaaggtcacttgatgccataagaggtaatgaggcatcagcgagaaatgaagttccttcaatgctcggggcatagcacgtatcgaggcatgaaaattcactcggttgtcctctccgccctcggcgtgagggaacgaagtgacaaaagagggatagagtacgacaacgatcacatccctccaggttaccgtcgcatttgagatgtttctcgcgacagttaagacatgcaactgatgtagccggatttgtgcttgtctggctgggagaatccatttgggtgatgttagtggagagaaaacgctgggtcacggctcgatccgaggttccagggctagtcgatgtgtggcaaatgtggctggcggtaatggagactcgtggtgaagctatagcaaaaatccaattgaaatgctccagatttgcataacttcgacgctcctatcctaggtagggcccccagggcgggctgcgacccgatgagtcatcccgaacgggcccatccggtgggcacaggtagttaggtaggtacctacctaggtacctaggtagatacatacattgtaggtttgactctaatactttctatcttgatacagtgctagactctactgcttatgaagcatggagtacaatacctaggtatgttgatattgtgcctacgggtactgcgtaaaactacgtcaagggagggaggaactatgaaagatttcaaagacacggcagtccgttgacaatttgcgtgggcacctacttcttattggcggcaacatcccgcctcatcaacagagtcggaaagtcgacaaaaacatgaggcagtaacaggtatgtccgcacttgccatggcaagatctcgctgcgtgcgaataaacagagcttgaggttccttcccggatctcacaaagcactcatacagcccgtgcaaaccccatacgttgtttagccgcgcccggcgacgaggaaagcccggtttcaagccaagatcctccctgaagacgatttcagcctctgcaacatgattctgttctaacaacagtgcgccaagagcgtgacgcgacggttggatccatgctggtgggtccgcgtaagggagagcatcttccaattcaaccgcttttctgagactggagaacgctagtgagtagtgtcctttgcgatactcaagctctccttgcagcatagccgcagcaacctgtaagacatcaatctcgcggcttggcaggcttcccagccgagacgcagggacagcggcatgagcagctctaaattgtaacaggatttgctgtgcttcttcaattctaccgagaacactcaatgcaatcccctttgcatagtagaccattgcgctggtggagcaaagcagcgtcttgtcttccggaaggtccaactggaggatatcatcccagcgcccaaatcgaaccagcacgtgcggcaatacgcccaagtaagcttcagcccagtcagccaaaggagggctggcaactgacaataaacttggagtcaaaatttcaccaaccaccctagcagctgaaagagcctcggtgaagttacccagcataatagcagcatatgatttggcatacgcattatgcgcccgatacatcgtgtacatgacggaactgtgttcacgcgcaaagaacttgttatcggcaagaatagcggcatcattagcaatcaatgcgccgcgataatcgccgcaggcaatgtcgatgtggcttgccatatggaggagatgagagccgtcgggcacgacgcgacggagactgtcggcggccttcaaggcgatctcgggccacggtgacatctccattaagtggatataaaggtgacagaaggccgggtgctccatgccgcccttccgagccattgcaggctccaaggcttgacgagcctcgacggtgcatcccgcaggctcgcctgttttgacattccacagatctcgaggtcgtgtgcacatgagagcttcagtgaagagagcaacgacatctgggtcttctgggctgagagtgtagacagaacgcatctcattgacatatgcatggtttaatgcgttcaagtcgagtggcatccctttaactggaaacctggcggcaagagctttgatcagggcatattcgatgggtgctttctctgccttctgagatagttcttgcgcaagtttcaacgcgacacttgcagtctcgaccgtctcgtccaaatctccctggtcgaaccggctccaagctttattatagttgggtcctagagcgtaggccagaccccaataggccatggcgcaattgggatcagattctgctgctgttttgaagcatcgtgcgccttcttcgtggttgaaagagtaggaccactgcaatccacggtcaaaccatagctgcgcatcgctcacggtagtgttgattggacgatggtatgtgcccaggttataataacctgcttctttattctgcggatcgatggcagacctgtaaattttttagctgatgtggggttcatttaagggtcccaaaagcggatcttaccccatatttggtgttgaagagtctcttagacttcacctgatttaactccaaaactttgacctgaatgttctgagatacgcacccttataactggtattagagggggcaatgcaccgacacaacatgacataaaagcgcccagtgcattgctatcaggtgaacctttgcatcaggttccaccaattcgccgaccttttcgggtctcggaatcccaattccaaagcccgaacctgtggccatgcacgaacgaggtaacatatttgtcatccgatataccgcggtctaatagaacctttccatgcctaggtgggtaggtacctacgcggcgggtatccatccatccatggatggccccggggatatcaagatattatataagcatatcatgaaggcactgcgctgttaatttgaaaagcttccctcaattggaaggcatatattgtacctaagtacagatcaatgcaattttgagaggacaagggtccttatcttccagtactctgtggggctctctttgtctagtatacctaggtagtgtcaacctcttactctactcagctttaacgtctcatggccattggcaaagatgtccagcatgagtagaagctgattcttagacttgattaacaaaggcagtcttgggtcttccgagtaactagatatttagtctgattgaaagccaacgaaggcgcttggtgagtcggtatgctcattcttgaacgaaaaatcaagactatgcctttgatcctttcttctccttccgaaacttcttaggctcatactcctgtaagtcacccaagcagggcgccacgaacagactgcgattgaaaacacccttcagagtgaagagcgataccagaatccacaataatagaacacaaacggatagtatctagggtcgtttagcagtttgaagatgaaacattcggcgttgaagtagcatactgtgcctaggactctgaagaatctggagggtatctctcgccccagctggttggtgcaggttgtaaagacgccgagcgggaaggtaaatgcccaccatccaaggttgaatggaaatttcttcgaccgaataatcgctgccactgcgaaaaacagccataaacagccaaatgaccacaggagaagacctattaggaagccgatatcgtagagcgtatcgcctgatccggatctcaacgttcctgtaagcggaaagaccttttgtgcagccatgcccaacttttgaattctatacagaaaagaatattgcattagtgtgtgaatcatatcttctagtcattttgaggctactcacccaaagcctccttgaccaagaggaccaaggggcaaaaacgtgctaacaatcactgctttcgctggtagcttgtacagcataaggcgcatcaaataaatgacgacgaccatcatcgctagaggcactccaatgccccataaaacataactcacgatgatagtccctagagcatactgagcatttgggagtatgtcagccataatacctcccgatgccgccgcaacgacacaagacacaatgggaagcagccaagcggcgcccattgtctgtagctcgatatcggccatttgagtcatcctagcaagcgagtcagtcctgacagtactttccaaagaaggagttgtattcacagcatacataataaatggcattccgaagcatgtcattacagacacaacaacgtcggcaatccacagaccccaggcaaagtaaacagtccaggctccccaggctggtacgcagacgtagcaaatcatattaataattgtagcaagccccatgggaaaagttccaaggaaaagggactgcgtgggatgagttaccatgaggtaaaagatttttgggtagaggacataacgtaagatggtgatggtaaggaaaatgataaagaggagaacatttaaagcgaatatcaccactgatatccagtataaccatctgccgttgtagggtaaagtgttcagcagaatggaagtaatgccagtgcccatattgactgagaaccaacttaggaagcagagttagcgaagttgacagcctacgctggagatacttacgcaggtgtgaagttccgcacaatacggcgccagccatggttatgtttcgacttggtttgggtaagcttctccattctcactttccggtgactctgataattacttacattcgtctcttgaatagcctcgctgcggccaggtaagacctcgtttttattgtctcgtaatgacatcgtaccaaaataggtttgagttaatttccgcggtattcgatacttcaacggtcattgatagaggaaaatccatcgagtttgatatattctgtcgcgattcaaatcgtttagagtacaaaataaaagtgcaaacgaacaaggcagatttttttgaggacttacgagtcgagaccaatggcagtataccccttcaaagttcaacatagtcatacctaggtaggtaccctaggtatatgatgattcagagaatgatgattcattcatacttgagccctccaaggttgcccccggggctaggcgccctggttaggtcggcgaccctaacgccttccggggatcaggtgggtctacgtgggccctagaggtagccaatgagagacactctggcaactcctggatattttacggcctgcgatgagcttccaagattaacaagaattcggagagatgttcaagatcattacattcagcataaacaactactgaggctcaagaagaagcaattccccgaatctctgaagtccagcatacgcccacctaggaaaccggattacccgttgacccgggtaactatatgcaagagaacacaatttgtgatgtagactgtcaagtcgccaaagtcattggagttcggggacttatcgatctgattattcctgcgatccagttcatgtgtattcaaggtactatctccgctgacaattcacttcgccaccacatttataataaagtcccggtgggcacaagccgaaagcccaccggccccacttatgtatagcttgggcagcacccctctccatatatattaaacccactacgtccgtagattgaaggtccatcaactcatataacaaatcttccatacctgatttcaccctttcaccgactccacatctcatcatgtcttccacagtcaagtcattccgtcaactcatcggcattcccccttccacggcctccaccagtgattcgactcttatcattgtcgacgctcaaaacgagtacgccacaggccttctcgcggtggagaaagttgccgaaactcgcaagactattgccaagctgctggaaaaatatcgacagaatggcactggcaagaacattgtccacgtcgtgcacgaagtgcctgccggcgcacccgtcttcacacccggcactgctctcgcgcaagaatttgaagagctgacacctaagccgaacgaaaaggtggtcactaagaacttccccagttcttttgctaagaccgatctgcatgattacttgcagggactgggagaagtaggtcagaagattgtactggttggctacatggcacacgtttgcatttctaccactgcacgtgtcggtagtgaacttggttatgatgtgctcgttgtgcgggatgctgtgggcgatcgcaacatccctggtgcagatgcggacactgtggtctctgtggttctcagcgagttggccgatggctttgccacaattgtctctgaaagtgagatcagctcgtgatttagttgagtggatactggtatcttgtacatatgaacaactcaaacctcttctgcgttgaaccgatctcgtcatcattcagcgcgtaagatattttcactgaattcgggacactgtccacattaaaagccaattcgaggtcaagggctgccagtgataaatgtagactaaatttcttctctaacaccatttcaaagcgcccatcactgaccttcaccgggtagaagattcgtgcgagaagtggaaagcctttccttgactggcttattgggcaagaccgtcataaatttagcatactggaatatcaagaaaacgtagaatagcactgcaatatacatacagttgctttctagtccggatactgactcttcgccaaccacgccctcttttctctcgctaaaccagcccactcccagcacataatccactcattctcctgtttatcccaggttagacgattttgagcctttcttttcaattataacagcaatatagcacaaataatttaaggtcaagagaaactttcagtttgaataggtcgatgcgtgtatgttgtttctggaggtgaaagggggccaagagacgccaggtcagcctgattatgtaggcacaaaaaagtaccgaaatgaagaatatcgccgaggagccctggcaaattttaacgatttgaaagcctcgtgagattcaccattaggttgtggagttgggtgggatgggcctgtgggatagtgggatgatgactgaggcccaagacgcccgtgggcgctcgagagtataagtacttcaagagcattatcaatgcgaaacattttatattaatatctcatattactctccactatggacttttcatcagggctataagaaattgacacacggttaacggtttgtcatgctatacatggtccatggtgggatgaagaacgaggtatcaggaatggcagactacataagtccggaaagcactgctgctcagctttttacctcatcattcttcagtttgtcattgcatcaagtcaatagtccacaccaaaagtcccctcaacccaacggcactatgtccaccttcaaaggcaatgtttccatcacccacatcacgactgccacggcgatcatcaacattgatggcgtgcgattcctcaccgatcctgtattctgccctgcaggatctgaatacattcacgacggctggtccaaggctcccaaccttggggacttcggtttcgagggtcagcctccaccggggattctacgcagctttgagggaccagccctccaattgcacgacattccacccattgacgcggtcttgctgagccacgaagatcacgtcgataacctcgaccctctaggccgccagctgctcgacggccgccatgtcttcaccacacctgatggtgcgcacaacctccagccacgccctggcgtcgtcggccttcgcccttggcagaccgtctcggccagactcggaggcaaggatttccgcattaccggcaccccctgcaagcacttccctggtggcgaggtgaccggtttcattgtcgagtgcgactccttcggcgttaatgaggccggtctgcccaacgtggtgtacttctctggagatactgtgtggattgacgagttggcggagatcaagaacaagtggcatgtttctgtcgctgtcttaaacctgggaaatgcgctatttgagcaccctaacggtgttctgcaaattaccttcgatgggaagcaagctgctcacttgatgcgtgtgctgagtgtcgaccagatggttcctatccactttgaatcatgggaacatttcactgagcatcaggcggatttggcaaaggtctttgatgacgaaaaggtgtcggataaggtgttctggcttactccgggcgaggaaaccccggtggtggttggctagtgcgtgtgcaggtgaattctttgtggcgttgcgtatgatgcaccaaagattagaaaagtcaattacgttctggatatctactttgattcattggatttatttctctccctagcggagtttccagagtgatagaaattcaagatagctgtgttgtgacaaaaagcagtttcatggacaggctataacgcagtagaactttcttcaacccgggctttgagtcaattccaccaattttcgtcagtttccaataaaactccgctctgtgaaatccatttggtacccctagggtcatccgatttatcttctcttctggagtatatcaaaagaagtcgagccaattctgcattcgagccagcatgccagagattcttcttatctggcataggaaattgtagatcggagaggcgaagaagtcggccgtcagtctcatcggaccctcccaagcaactcccccttccacagagccgagaaaccttgtacaaggccaaaccgaaccttttgatctcttcgacccccacccacatacaggtaatggactccacataatggtaccttgtaagcatattggggtagtagaatatgttgtttcgtagacaggtttcgatcagagcggaaaggatttgacggtcaggcagatgtaaggtcaggcagaggttaagttcgagaccaatcggaaccgatgccagtaatgagaatatgatgtagaggagaatgccttggtaggttgcaatcggccatcgtgaaattgggctgcctgaatcttcgttatcatgctccccttccaccggcaatcgtccccagttgtcctacggataaaaccatcaacgaactggacaaatctttcaggtcgaacgagtgcctctaggtaacttacccgctgtgctgaaatcgccattccaagcttggaatgcaagttccgagcattttgccgcgctgccgggctcccactgacccagagtccaatcattaacactgcctgaagcagcaatgggggctcgtcaggaacactgaatgtgtgtcgatgcagaattggccagtgtggatgaaaatgcgcgaagtaaagatgtatgtaatggtcgactctgggattattctcgagggaagtattgatcggatcattttcaccaccgtactccaagagttcttcttcgggatccggtagagcgggctcgatatcggggagatcccgaccatcgaatatacataagtttcccttcaaagagcactctgtacatggcgagcctccctggcatcgtgttttggccatacgacaactcctgcaggcctgtgtggcgcgagcgagagatcgtccgggcacttcatgatcgcgacgaatatgacgtcgaaggctgtcactgcatagctattcattattgaatgatcaattgtatctggaatcaaggatcactctacctgcgagaaaaggcacgaccacaaactgaacaagtgcgaaggtgatttccacgatgttgcgcttcgtggcgtcggagatgctctttacgacggtagctcgaggtacagccgggtacctgacattgaaactgtgccatattgtcactgtaaacgctagaaaggtgatgtgaaaggttatcctgttaacatggactacgttgtttctccagggccgcccaccggatgtcagcccaccggatcagagtggggccattttcgccatctacgagttcgtctcttccacacaagtctccctctctctttgagcttcgtctgataaaatctagttcaataatctgatatatctcgtccaggcttaaagggacatatgcaagataaccctaggtcttttctttctctatcatcttctcaaagttctctccaaatctcatctcttttccaatgtcatttttgatgtcattctagatttcttccgcgctgctatagcgaaaagacaaaattagctctatagaaatactagtaatgggaataacagcacatagtagactctacattgagggaaatacgaaggcagtataaagcccaaaccgtatagacgacttttatggggtggcttcagccctatggagcacctgttttacctcgttccctttctctccttccttctctccttaacaccttctttctctcgtcttctttctctgcgccccacagaacggtgaatgcacacaagtgcgaatatcctggtacagcccccggacccgttcgaagggctcagttccgcctggccttggacacaaggcttccgatattgaggcgcctggatagctgccacaggtatttccagcgacatcagggctatctgcaccaaataatccttcccgttatcttgccaaaggctataggagatccgacagagaatctggaactttgcggagtgtctacctaactgggaggaggagacataaggtcgcttcgatatacggtgccaccaccgaatgcaaagcgccactaggacacctccagctaatagcgcacttcagcatacttggacgcttggtatcaaatcgctgcgacgacaggagctggcaagtgcggatgtggtgcttatggatgtcaccggaggcttttgaacctcaagacaatgcatggtcaaatgcatccgaagctaaactacattctccgggggatcgccggtcataccatactgccaaccgtgcaagaagaggattgaataagcagagaacgactgtcatcggcctacgcttacttcttcctcagccagccgtgggtgatctctacaaagaatactgatagtcgaggaatggtctcgaacaagagggtattctgaccaaactgaaattacctaacatcctaaagctccaagcgaatattggacaacaaaggcctccgtcaaaggaccagagagcccagtagtatgtatgatgaagagtcataaatgacttgtgaagcgacgagttctttgatcacggttctttttctcgatatttattgtaatgtagtatttattgaaattgtgtcctcatatctatcatgtacctcattgattaaaaaaataaattcactcgaattataacttccatcggcgagccactgcttggtcatagggatcaagtgttaaggtggccagcagcactttttagccccaaacatactcagacaacccaaagcaagtcttatagtacgggcaatatgtagctgttagaggactttcaacgtggtcctttatggggcactgagggataagtacatatgtagacgcaacctagggatctcgaatgtctatgtacgacataaatggtagatggaggatgaaagacaaaaagttcgaggcccttctactttgaatacaagtcaagtggaggaaatagttacacagtgtattgtcaaattcaatatggcaaaactcataggaagatatgcactcctcgtttactctgcacagttcggagaagagaaaattccgtgggtagaaagacccttgagcgtgcaatctcccccttttgccgctttgatagcaacgccaaggcgactattcaagcttaaaatgccacaaaaatgaccggcatatcttttgcattatattagcggctgtttcgtgacagggattgtattacgtattaccaggggactcgtaagtgctgacacggcttttttaatctgatacactggacacatttacagatgtacaggattataggatgctatcaagccaccctgacaaaacgcgtgccctattagtacgtaactatttgtacattgtactccgtaccgcccacatgtctaaataccagatgggcctggacaaaagtggattatcctccacagttcaggtgccttcactattgtacatcgatatacaaagtaatatacaaagtactcccgtgctccggatatactccgcacgttcttaactgaaacagtatacaagttccgaaaaacttcatattcatatatatagagcgatgaaacaaaataaatcagacagaaaccacatttaaaaattcccatttaaatggctgtcgatcccggcccacttgtgaggaaatccatggcccaggaaatgctatcgccactggaaatacgttacccgataagctttaatctttcagggtctatcctttttttttacctttttttttcaaactgggaacttgtcatgtgacatagaaatagatgccaattgcgacacatccttgatatgtaggaatgtctaaaaaagacagattagataaagggctaaacatccaaatgatgtgtgatatgaatacgaataccaccgcccagcattatggtataacgtcgtcaagaaggacgcgtgtctgtgggggggcattggcctcatttgcccctccggccgattttgactggctgacgcggctgggtgccagggcgatcgtctctgatcatttccgctctttttgcctctgatacggagtacaattgttgtatacctgtcctttccattcgatactgttccagggtcaaggtagttaatagttaggacggagtcctccgtgcttcgtacttatagctcttattatacagacccttaagactaatctggtccttttactttgatggtcaaagcgccaacctgataacagtgacgtgatctccagttcgtgtacggagtaattattatgttcacatcatcatgatggggtctcgggatacgaacggatgtttcttgtcgcttatattgtccgggattgctgattgttgaggttcaggcacagatgcaatccgacgaatttgggatacataacgtatctatacatagtagtatctatatgcagaaacaagtaccccgtactcacggtttcgtacaacatacatatagaaaggctaggggagagcaatcggagttatctgtaggcgtgggtttctggcctatcatacagatctatctatgcagatgtcctgaacagctgatcggcatcctcgcgcgagcccgcatccaatacgtgtcgccgcaaacagccttttcgaccttgaagatacttggattatgtttgttttggagtatcaagagccatatgaccatttccgacttgaacaaccacacctgttcccgggttagacaaaaatatacttgttgtgctcgagacagggaaaatgaataaaaaaaaacagtgccgatcctcagtttcatggcggcgtaattctacgaaagctgggaggggatgatcatcactcccagggctaccagcattcctttttccgccatgatcggcacttcgattcaacaggaaaaacgaagcaaaaggaagaaaagtataagccacatatcatcaaagatggtcctgtcgaaagggctccgttcctgcatcccacatcccaacttggcgtgaacaccgcaaccggggggatgaataccaagatgtcaatatcacctgggcagcaatacattctgatatcactgaagacagcatattaatgaaaaacggcggagggcccgaacatcagatatgtacacatgtacaccgatgtagaaaacggatagaaaaagaagttaaaaaaagaaaagatctaaataatatattacggtaatacccatacacggccaaccctgtcccgttaattgcttcggcggcctccctttttctttcctcctccaacaacttgacgaccccaatactacaagctcccatcgactcttcactcggactgggcacatcgtccagccgcgttagtctttttctctattctcttcctgccctcctgcttccccctttacaaacgttcccccctttggaccgtgtcgcgggtcccgacgctgccagcctctcgttgaaatatctcggcactttatttgcctgccactctttaatccactcccgggacactcgtttatttgactcttccctcaaccgagaattgcattcttgctaccagcttttgctgcacgatattcccggaatacgatacctcgcacgccgaacccataacttttaattccagggttcatctgctacgatttcgcctggccttctatttacatgtttgaaaagtcgtcattcaatactggaaaagccaaaatgcctctatttcggatgaagacggtattcccgttggtggctctggtgaccatcggaatattcttcttttgcatggaacgctacgaccgctcagctttccttcggttcaagcatccaattgatcgggccaccttcggtggaaacaagcaacctcaagtacaaacgccggcccaatctgattcgcagcaaccgaccagcagcacctgtgaggctgacccgaaattggccgctccccttccattccctgaatggctcccgcgcaagaactacactcgtgcctatttccgccctcgtcatgtgaaccctcgcactgaattccacactttggaggaaatcgagaagcctgtgctcccgcccatggttgtcatggagcgcggtatggtcgtatctcccgagaataagccggagagctttgtttgtcccgagatcatcgatgttgatgtggccgccgatgacgatgtcgatgagacctccaagctcctgtttggtttggccactaccgttgaccgtctggaccgcctgctcccctctctgctttactcctacggaaacaccaaggccggtctgattgttctagtccctgagtctgacgacgacctggagaagcaggagacctacttccgcaaccgtggtctggacttgactctcaaggcctctccgcttgacttcaccgcccgctactttggtatggtcgaggcgttcaccgagcatattcgcaagcaccgcccgcacaccacttgggttggtttcagtgatgatgataccttcttcctgtcgctgccgactattgccgaggaattgaagctcttcgatgagaacaagaagcactacatcggatctttgtctgaggccagctggcaggtggatactttcggtcacattgcattcggtggcgccggtgtgtttgtctcgaagcctcttttggatgtcctgatgaagcactacgatgagtgccaatcctggggcgagcagcccggtgaccagaagcttggccagtgtatccagcgtttcggtgacacacccctgaccctgtggccttccctctaccagatggacatgacagaccccgtggacggtgtttacgagtctggcaaaaagatcgaatcaatgcaccactggaacagttggtacagcaaggacgtagttaagatgaccaccgtttctgctgccgcaggccgcaagtctgttctccgtcgctgggtctttgatcaggaggagactgtgaacagcgctaccggtgagactctccgtcacttctgggtcatgaccaacggctactcgctggtgaagtacacatacggcgagcatgtgccagatgatgctatcaacttcgatgctaccgaaaagacctggccagaagacccccgcggctatgaagaccgtctaggccccctgcgtcccgcagaggaagacggcgttgcgaaggatcggtggttgcttcgtgatgcattcgtggttggtcagaacgtgcaccaattctacgttcgcgaagaagatgagggccacagtgtgattgagattgtctggctcggtcccaagggcggcggtggcggtggtgtgagtgaccattaccttcgcggcacttaccagcaataaaattgcaccgttactacttgaggctggtccttgggactgttgctcgtacctcttcacttcgttgcacatgattcggctcctttttttatttttctaaaatactacacatcttctttggcttttttttcccccttcccgacttcacgacgccagcccaatatgattgcacaatcgaccaaccccacagcccttttcttttccggatgagactcgtgatcgtgacttgccctccgcgtcctccagtttctgtttcatttatccggcgttgcattggcggagtccagtacggtgcaggaacctggtggctttgcgtgctccctctatatcctgacggtgtattctgatttttgaaatgttcagtggcttttttttttctacactctatccttgaactcatgcgggccttggccgagacttgccacacttgatcggtttgaccttgctcttatctttccttatttcctattttctccgtgtcttccggccttgagtgcgcttcggggcaaagccactttttgtgccctatgtcttgcatcctttctgtaaaaatagacttgacagcagacccagtttggggtctccgttggtgattagcgttggacctttgttcattatgcgaggaatatgatcagttttcgtcatttcaatgttgtgctgggtattcgttgatccgttggtatgcagagaaggattcctgaagtgactgagctggactccgctgcatcgggtctagggcttctcggatcggcccgttgatcggctttggttgcttattgttgctatgtggattcgatgggatggtattatctttcatggacagtcaacagcggttgatattgcctggggctcccgatgtggttaaagagccccattggcaaggtggcatagtaaccacctgggcaggttccaggcgtaaaaggcaatgaatgttataactttacgcttagagaaatattaacccagatcacttgatgtgaaggtattgcagacttgtacaccgtagatgtgggagtaataataggagtaataatagacgaagcatggaacaaaccccgactctggattcccctggcttctgctgaaggcctactgaccaggtcaccccgactcctgtgaaccttgcaaatccatgtctgtgagaccccaaaatagtatctctaggggctctacaagttccatgcaaggcatgcatgtgtgtgcaaggggatatgagatatttgagattattgtatccagcctgtggccttgtacttcgtacttttgtgcaatgatgaatgtgaggtcggcccttgtggttgcaatcggaaaggaatggagatagctataagagagataagagagtggtgacagggttgccctttttggctatttatgatgaactccgaatgcagccatctgagtatgttgtatacagggccattattccgttccacaaagcaggtgcgacccgcgcctgtgtgatgtgagctcttatattttttttatatattccttgtagatgtaaccttgaaataggatgcttctatgataccagggtcttgatagaaaatgagggatacctagctactcttaaggcatgtttaaaggtggaatggccaatcacatagcagcggagcttgagaagttctgccccgtcgaggcatgtgaaatagaatggagtactaagtatagaaaggtacatatagatttttatattattttcttactcgagactttcaaatcaagcagaaacagaaccaaaattggagccgaggatataagagggacttgaaatcggcaacaaaggaaaaagagtccagaccagagggggaaagggcaaaaaatggcaaacgggggggccgaaggaagaatcagccaatgagcggtcggagccaagaatcgtgtctggttcagatgaggcgaatacggctcaattacaacacaattacaacacaatacaaaaataatagtagtagtacttctgcctaatattaactttgctagtacaataagtaccccaacttatttcaccttacaaactgtactaataccatcttatcacgtgaaccttgtaacagaccgcctgcccatcgcaactcgcactttgccttcttcgctctcccccccccccatcgattcccccattccctttctctcacatcccagaaacgcgttactcgattgggtcatctcttgctttcccctttcggtatccccccctcaaatcataaccacccccccatattaaacctctttttgttctgctttattgccaatatgtctgcggttctcgacgaaaagctttcccctggtcacgatgaccttcccggcaacggcgccgatgcccgtggcaccaagcgcaaccgcatgagcgccgacgatgaagatgatgatgatgataagcccggccgtgagcgtcgcaagatcgagatcaagtttattcaggataagtcgcgtcggcacattacattctccaagcggaaggccggtatcatgaaaaaggtacgtcgcgtcccgaggccccctccgcatcagttccccgatcgaggttccttccacatttgatcgattggaacattcaactaaccatcctggaattatataggcctatgaactctctgtcttgactggcactcaagttctcctcctggtcgtctccgaaactggccttgtctacacctttactaccccgaaacttcagccgctggttaccaaggccgaaggcaagaacctgattcaggtaagccatgttctgcttcaataatactctttcaaccagccactaacacacactgacaggcatgcctcaacgctcccgacccagccgctagtgagaacggtgtcgacgcctccgatgtcgcccccgaggcccccgaagatgtggctcacaacaacgtcaacgcacctcaggggagtatgcgcccaggtattcaccctggctacatgaccagtgagcagcagcagcagatggcgtactaccagaacctccagcagcaacaacagcaggctggtggtcagtaccccatgccggtcggcggtcgcatgccaccccagcaccagcccactgcttgaatgcttaaattatgatctgatctttggggtccttcttgcttaaggtccctgatgctgcgtcttcttctctgttctttcctccctgcgcctcgatctcgcgttcatttgatacccgtctctgtgccgatccatcatcccactcttccctcggaaatggtcgcgctgtatctgcatgcgccattctccagggcactctcgtgagactatttgtaaattgtcaagcaccgcgctggaatacccttccagtctctctttgatgatactggatctggtttttccttttgatattgctttctatctcggaaaaaggagaaccccaatttgctgagaactatggcttttccaataaccaaaaaaaattcaccaaaaaaaaaaatgtccgtcacaaaaaaagaaaccaacttcaagaaagagaaagagagcgcaagcaggcaaatctgggcttcattgctaatttggcttttgttttcccccctctacctagaccatggcggaggatggaggtgttcgtggtgcattgaaacttgtcggcgaagtggcttttcctccttagtctttttttgctcttttagttcttaacctatttccttgtccactggttatgttatttttcctcatcgtctaatctcaaactgtgtgttaattttttttcgttgattccagccgtgatgagaccgtctgtcttggttatgacggattctcaatgccactcggttcgaacttcgcaccgctatggctctggctgggttacattatgtatgctatggagcaatcggattctgttcatttggactgtcttgttgcttgctgtagtcgtgatggtctatgagtagacttgtgttctgctctgtctccatataccgctacgatgtataactggagggacagcagatccaaaagatatattctcgcctgtgtatttattagggtaaatggtctcagaacgcagttctctaggcgtttagtataatattatcagggttactataggatttgtcagatatatttccaactatattcaatgacattcgcttattttgacatgctgtacgactgctgctgctttgttctaaatctgcctaacctacttccaagccgaagagatgtataccttgacatgcatccatggaaagaaaggaagaaagattgctgacttgcatgtcagaggccaatgccacgaccgaggggtttttggcaggcatcgtgactggtttgcctaagatctttgtattatcaccataacggaatatagactaaatacctgggtagttggaatttgttatggtgtaggtctgattatatgtaaagtgcgagcaaattgtatgatggtcttatattcattcgtatggagctatatcatcgattgggtggtatcatatcatagtatcttgacagtgtatggcagaacataaaagagagatcgagattgatcttttctcgaccggagccaggagcgacggaagcaacaaggcgcggttatggccaacgaagaggggctactgtacatgggggttgaaaggcgaaaagcaaagaaaaatccaggattgtagtgttctgaaggcagcgattgactgatcggagcaagggtgaatattatgtggaggtgattgggggaaagagtatattggaaaattgtcaaggggatgacgatggctgaagggtgtcggattcaggaaccgggattccctgtgtatatcctgttcgtggaagacgggcgccagagtgcgagagtagggacgaggaagagccagcttccgggtcaatctcagcctgactgcccgcctgcgggctgctccaccgagagagatattgtctcccaaatttccagacatctgccagagccctccttgggtaaacaagaagaccagacctggcgccagaagaacgaatgagggggaagtcgttgcgccagtgcgtatcatcgccatcctcttggatagttccgtacccaccgacctcttggtgagacgatgatgtaaacggacctccagccccccgacgtttacgatgggcggccgatagtagcccactctgaggtgctgaggtacgacgccatgggttctcacgtagtaatccctggattccgcgagatcccctttcgcgatcgtttgtagtagcgccgaccgtcgactgccgtgtcagaccccataatgggccgtttagagttgcgctaccactgatgctgcgtaggcgatctgccgacgactttttatctccatcagtggattcatagtccgaatcgtcgagttcagcccaaatagatgcggggtttagatcgaccgagtcacgatcaaaatgtaaactaagtggtaagctgggagctcttccccgctgataggaaagatgtcgagtatgggtcttcgggttgagaagtggctcgcattctccaatctgtgattcctcatgctggccgtccagcaacccaggcgatgtcggagtgtgctcttccacaattgccatacccggcccaagtccggtctgcgtggaaccgacagtggtgacagcggcgtgtgtgtcgatatcctcaagtcgccatgacaggcacaagacaccacctaggagaattattgttcccagagcgattagaccggcgtgaaagcccgccagttgtgacacttgccggaagtagatcaggccatccaggatagcaatgatgttgtagatgcagaacacaaaaggatatagtacactagtactacacagctttagcccccgatggagatagaacaactgcgtcagtgctaggaagatcatccctagcaggataacccatgattgccaatgattgaactggttcacaccgtccaccactgtgcgcacgagaagctccactgccgactttgccagcaaaagggagtgagctgacagtataccactgacgaatccatagctcatgccgcggatcaatctcattcggctatgcagtcgcagcagatgtggtgaaaaatgaccggaggccgagggttttgcgcgtgaggatggcgggaagtgtttcagcattttggtgcctacgagtaccaaaccaaccaccagggtggtggcgcccatccacagaagaaatggccgtcgctggaggagatccaggagctgatccaaggtatgtgcgggttccccgatggcgccgaaggtcgcaatcaacaacgcgccgatgcagacgagaacagtgcctgcaagagaatatcgggtaaagggttcaccgagaatgagggtcgcaaatatggtgttgaacactagtccagactattcggcatccccatcagcaactgatctacgtcgtggcatggagggggaaacactgaccgcttggagcgtcgagagaactggtagtggaagtgtggtgatttggatggtacttccaacaatattggaaatcacaaacatgcccattcctacttgccatcgtcggcgcttgtaggggggtctgcgcacatcgtaggggtgcttctcgtcctcaagcaaatgcgacttgcgttggagcgtgagccctatagcttggaggctggttgagatcagcccaacaattacaccaacctgatatcggcattaggcattagttttgatcatgtcccgcagtatatcctgatttccgtggtcttaccgcaacacttccctccggcgataagtcacctagattgcccatgttgcgtatcgtgcattggtcgggtcgagggataggagaggcgcaccaagtaggaaaaactaccggagtaaagaagccatagctcagataaattataggcaaagacaggatcacgctgaaagggtaggttgtcgaggggagtgcagaggacctggatgcggaacgccaaggcaacgcaatccgagcttagttggacacaacatcctttcccttttccccacgtcattccaccccaacaggctatacagcagtgcaccaccaaaatgtcacaaagccatgctctttcagatgatcaggtatgtttgatgttgagtctaagtttcgggaagcttgagttgaactgatggccatcgaatccaggtcgcgggcgagctccgcaagatgaccgccttcatcaagcaagaagcccttgagaaagcccgagagatccagttgaaagccgacgaagaatttgcgatcgaaaagtccaagctggtgcgccaggaaactgcggccatcgataccctctacgagaagaagttcaagcaggccgccatgtcccagcagatcactcggtccacccttgccaataagacccgactccgcgtgcttggtggccgtcaggagctgcttgatgagctgttccagaatgcccgtgagaaggtctccaaggtggctgccaacgaccagaagaagtaccaggccatgctcaaggggctggtccttgagggcctgtattatctgaacgaggataacgttgccattcgctcgcggaagaaggacttcgatattaccaagaaggctattgaggaggcgaccaaggagtataaggacaatgttggctccgaggtgaccgtgaccttggacgagtcggagccgttgccagagggatcgtgagttcattcgccccccgctcctgatgtacgccaaggagactaactaggttgcagtgctggtggtgtgtttattgtcggtggacaaggcaagattgagatcaacaacactttcgaggagcgtctgcggctgctggaaattgatgctctccctgcagtccgagagacgctctttgggaagaaccagaaccggagattctacgactaagtgtgtattacttgttctatctttgttctccgcgtttgcgactgatgtatttcgtgtgttatagttcgggtaatctttgtctctcttgaccatcttcatagacagagggggttcctttgcacagttcaagtctgatctggaatatgatcgaactcttttagcgatagtttacattccaagtttttgaccacattggtattctgtaataaaacgcccgggagaagaattcgctttcgagggcatgatcataagggtcataagtcatagggtgatagaagaaagttgggtacttcaacatctcaacccatttgcgcagtatttgtgcttcttcagggtaagttgggattttgagactcaaactgccaacgtgatcagggtacctgaccatgcgcgcggatgggaatctctgtgtcaccattatccgcgtcgcctggccctgcagactgattccttccttgccaagtttgagtatgttgctttccagcagcaagcgcagcaaagttgctgaaatggctccgaatattaccatctctctcctttacatgtgactcgaaaatggtagttttcggcggtggcttggaccgaactgaatagacaactcggtaatgcaaggcctcgagttcactctttgccaccgtccgtgttacatgtgaggctccagaatcctgaatagagcagaatatcatcttgatctgagctgccagcctgtcgatggcagcgtcgtagtctttctccgtttgagtactgctgaaatttaactccaacgcggacgagtcaattgcgacgttcagaagagcagtgagtgcagttaattccctccagtcgtagtcggctatacccttgaatcgcttgacttggaaacgctcatcgcggagcagtaacattgtgatacgtttgatatcaagcaacttctcaggaggttcggtgagaggactaggacttcgtagcagaaatgccacggccaggcgacatcgtatcagtgcaaaccatggagacgtgggcaagatatgatgcacaatttgactttggatgcaaacatcatgtatcgtgttgtagaaagtggcgcagactcgacgcaactgatgtcgttagctttgagcgaggaataacatatagaagacagtactcaccgaatcttcggcaccggcttcatggaaattctccggatctaacacagcgttgatggtccactgaagctccgaagataccatcgaatccgccgttaatgaaacatcaagagtaagacgtagcagtaggagcaccacctgctcttgggtgtcttctgcgaatctacagatttgtaagccttgcattgtcagggtctgaggagtgagaactcacaagccagcagtttttctgagtaatctcaggactgaaacaaaagttgcatggtctttcaacgcagaacccggaggaatatctggcggcgtttattagcaagatcgagagctacaagcaaggtggtcgaatcatacactgagaaggaactgggataatcttctcggaagtatccaacgcctggctccgagcacccaatcgcgagaaaaggtcattgatatcagctggacggatgagcaactttaggcgctcgatattcatattcttatatattcagttagtgaagactacttggagttcgatataagagcatttacaaaccttaataattccgtaataagcattgctcaattcctcccgacgttcatagggtactggaaggcatgttagcttcgtgccaatgagtaaaagatgaagaagacgcactggaacgaaacatccacaaaatgaattcgtccggcaaaagtcctttggataaagccatctgaataaattcgcctgacatgaactgacgctcgcgagtgtcggattctgcaagtcagttagcatgtaataaagaagacagcgactcatttgaagctcaccccttaatatatccatactcgtcccaggtgcgaacagatcccgtggaaatggggggaccggcggcaatgtctgcgtgcaatcaaaaaatggccaggcgcggccgtgatcaagagcatcggttcttctaatagcacttatcagacgttgacctccaacaccgtcttcattctcgccaagcgctgagatcaacatggtttcattcagggcagtgccggacgggtcgtttccgggatccttgccgttcagttgcccctgtacataattggctctcacccgagcgacactggcttcgacctcgttatcatccactgcatcgtgaacgagagagtcaatggtatgtctgtatttctttggcgatgatattttcgtggtgaatttggccggtgtggattcgtccatcttagattttggagcgaaaagattctttgggtcttccaacgagcatattgagtctgtgtcttccccgtcagagctgatgactatctctctgccatccttgatgatgcgctgggatccgctgaggctctcgttcagagatgaaccccccgtggctgactcgatgctttggaaactttgatgtagtgtagggggttgaaggagggtatcctgagtcgatagatacagcgccgcgtttaagtgggcctcagcatcttgttcggattctggtgatatctgatcgaatacaaaggaagaggggggttcggtgaggggtgaggattcggttgcaagttccgcggtttcattcttctcaggtgtgctgttcgagttgacatgattgaatgcaggcctattgaaccataggtcttttatggtccgcatgatggggtatgctgaggggcttccttttttttcctaaaaaagaagaggcataatcgcgtcgtcgaacgcgcccgttcggcgcgatgtcacatgagtgctgactcatactttctttgtttgctgtggaacctcggggcaacttgggaaggctaacgagtcaatctcttcgagaccaaactcatattgaggtcaaaatgaggcattgaactgacatatctacgagagtacatacctcgtactacctaaaacatacttggctatgaagtatgctagttatatactatatgttttattgtctattgtagatctgacagccacattcctggtggcgtggatctgcggctgatccttgatgactactccgtactccgtattccatccacccgtggacggatactaactgcccaggtgcaaattttgttcgaatgacaaacttgggagaagtgaccgattctgttatatatgttcactgtatcagtctagttctcggagcaataacgctccaactaactttagataaaatgacaatacgctaaatatcgggtcccactagtatagttcgtggtcgacgggctgacgacaccctgacctgtatgtcttatgttgtatcagcacaccattcgaatgctgcactgtataccagagcgctgtcgctgcttttgctttagacccttgcctcgagatctgtacgtcaatattttagagtaacatatccgtgagacatgggttttggtatggagtagggctagtagaaagggggaacacgagtcccgggcaacccgcgaactctactctgtacgagcacgctgatcattggacctgttcaggagtattctcctgaagccaagagttttctttttgtccttttcctgccaagaaaaaagggaccgggatgcatatactgttgtaacataaatattaatacacgcggcataaaagcacgggtccaatgatattttgatccatacaggacacgccttgggaatttggcagatactaagttacccacagccttactaactaaatagccatcagagcgaaaattaagaaagctgactcaggtgggccggaaagctcgtgccgtgtcggtggtttcaggattgatgctccgaccccgaattctgggtctctgatatcattaagggacgcgtgaggcagtgtgctcacaatattgtcggattcttcaaaaatgaccttatatgttgtatttctatctatatgcatgatcgctaccaagatagaaacttcatcgttagtaagaattttagcctggtaactatataaaacttggaacacgaggaaaggccagctgttaaattaatggttcatagtgggggcaaagaaacaagagctgtgggccaataaccgttactccagagtcttcatacggatgaaacggatatgtacggagtacggagcacactttcttagtgaagaactggggagaattactccgtacggtaggtaatcccccgttaagtctagtcgtaagcgatcataatgctgacggtggcagtgcggcgatacgcactaatgaaaatctacttccctacccaatatctcctccaagcgacaaagatacatgttcatactatgtacatcaatatattccgagcgtcccagagttcaagtgccgagtaccccgattgccactgtcagaaatttagaagggggaggtcggaacggggctggatgttataattaccggactttacacgtattgtcccttgagtccgagattgtatacatcgctacctaagccccatcagccctaggtgattatttagatcgctggttttaacacgaattaagctgcctaaaggtgccttgaacaatagaagcaggcagtgtaaaacacggccaaaacatattataccaaattataccagaactatacccaaattataccaatataacagttgacgcgtgtaaagatctcccgccaagtccactttggatgacaaagcagaggtatcttgacccggccccatcggtaagcatccacggacgggtggtaacaatattacatactctcctgtactgagatccatacgagtcaggtggctacaccatctctctctctcacccctcgaagcacagaataatcaccaaattgcttcttctctttctttcttttttcacttcagtattttgaatggccccttgcgggtgcgccctataacctctcggctttggcatttcatattcccatcacgatcggccgcagaaaccctgttttgaatagttttggtcaattcctcgaagctcatcgacgagaacatccccaacttgcgcggctaggccccctgatttgctcgagacttgcgtcgcccatgacattgcgtttccctcaccccaaaccctgtgaacgcacctagaccggcaatctttctctgcgcccagcgctgtcggattccggcccttcaaaccggatggttgtcagttaccgataatcaaggtctctgtcaagttatatgccctttttgggtgcatcaatagcctagatggcttccgtgcgcttccctggggacaatggagaggacaacaatgagcaaggtggtgacatcggggaggtcagcagcaacgtctccaagccgacgaaacgacaaagatgggctaccacgcgagctcccggacctggtggcatcaagaaacgtgtttctatcattgatcgcttccataaacggtcagatgtgagagacgaaaagcgaaaatcgaacaatacaagcaccacagccaatagcggacccgagacgccgcaagaagggcccaatcggagaatctacttcagcattcccattccggaatctgaacgagacgaagatggtcatttgcgcatcacgtatcccagaaacaaaattcgcactgccaagtacacaccactcacctttgttccctacaatatctggctacagtttcacaacattgcgaacatctatttcttgttcgtcatcattcttaacgtacgcagtgacataattggttccctggctccaatcctttggcattggctgatgatattctagttcttccccatcttcggagccaacaaccccggtctgaacgccgttccactaatcgttattatcgttgtgaccgctatcaaagacgccattgaggattgggggcggacagtgtcggacaatcaagtgaacaattctccggtttacagattggtcgaatggaacaatgtcaattccacagaagaaaacatcgatctatggcgtcgtatcaaaaaggcttgtaccagggcctcgattgcctcgtataaatggatttcttctcagtttcagaagaaagagaaaggcggagatgacgatcaaggtcaaagacgcgcctcattcttgagtacagcagatccccgggcctcgatttatacgcaacgcaactcgatagcccccgaagatgtcgccatccccatgactgatgttccatcgcctcaacccgaagctcgcgaagattggccgatgatgaacagcaatgagaacaagtatttgtctccgaacagcgcagctcgacagagcgtcgtggaacctacgccggacaagaaacatggcaccgtcctggatgcgtccaagcagacacccggcaaagcgcgatttaagcgagagcagtggaaaagcctgcaagttggcgactttgttcggttgtacaacgaagatccaattccagccgatattgtgattctgtccacttctgacccggatggcgcctgttatattgaaacgaaaggcctggatggagagaccaacttgaaggttcgccaagctctccattgtggccgtcaagttcgacatgccagagactgcgaaaaggctgaatttgtgatcgaaagtgaggccccgcatgccaatctgtactcttacaatggtgccgtgcgttgggaccagcgggatccaaatttccctgaagctccccggaaggagatggttgagcccatatctatcaacaacatcttgcttcgtggttgcaacttgaagagtaccgaatgggtcctgggtgttgtccttttcaccggcggagagagcaagattatgctcaattccggcgcgaccccggccaaacgacctcgcatggcaaaggatctcaactggaacgtgatttacaacttcatcatcctattcttcatgtgtcttgtcgcaggtattgtgaatggaatcgcatggggtgcgccaaacaaatccctagactacttcgatcttgagtcttacggaggtacaccacctgtcactggtattgtcactttctggaccgcagtcatcctgttccagaacttggttcccatttctctttacatttctcttgaaattgttcggaccatccaagcggttttcatccacagcgatctgttcatgtactacgagagactcgggatctattgtgtgcccaagtcttggaacatctcagacgacgtcggtcaagttgagtacattttttctgacaaaactggtaccttgactcaaaacgtgatggagttcaagaaatgtacggtcaacggcctggcatatggagaggcttacacagaagcccagattggcatgcggcgtcgcgagggagctgatgctgatgcagaggccgcagtggctcggcaacaaattgctgctgatgcgcagcaaatgctggacctgttgcgtggcatccatgacaacccttacctgcacgacgaccagctgacgttcgttgccccgaaatttgtggccgacttgggaggacaatcgggagagcggcagaagcactgtacagaggacttcatgctggctcttgccttatgtcataccgttattactgagcatactcccggcgatcctcctcaaattgagttcagggcacagtccccagacgaggcagcgttggtcagcactgctcgagattgtggattcactgttctgggccgagcgggtgacgaccttctcctgaacgtgatgggcgaggaacgcacatatacagttttgaacacccttgaattcaactcatccagaaaacgaatgagtgcaatcatccgaatgcctgatgggactattcgcctgttctgcaagggcgcagacagcatcatttactcccgtctggcccgtggcaaacaacaggagctgcgtcgacaaaccgcagagcacctggaggagttcgctagggaaggacttcggactttgtgtgttgccgaccgactgcttactgaggatcaataccaagcatgggctagagaacacgatatcgctgccgctgcgatcacggaccgtgaggagaaactagagaaagtttctagtgaaattgaacaggagctcatgcttattggcggaactgccattgaggacagacttcaggatggcgtgcccgatacaatccagcttcttgcagacgctggtatcaaactctgggtccttaccggtgacaaggttgagactgccatcaacattgggttttcttgcaacctgctcaataacaacatggagctgattgtgctgaacattcccgagactgaacaccagcaggcctctgacgaactcgataagcatttgcggactttcgggctgaccggttctgacgaggaacttcttgctgcccgtgctgatcatacaccgcctgagcctacccatgccgtggttgtcgatggtgaaacactcaagctgatgttgtccgatgagttgaaacaaaagttccttctactctgcaagcagtgcaaggccgttctttgctgtcgtgttagtcccgcacagaaagccgctgtcgtgagcatggtcaaaaatggactgaacatcatggctctttctgttggtgatggtgccaacgatgtcgcaatgattcaagaggcggacgtcggcgttggtattgctggcgaagaagggaggcaagccgtcatgtcttctgattatgctattggccagttccggtacctccagcgccttcttttagtgcatgggaggtggtcttaccgtcgccttggagaatgcaccgccaatttcttttacaaggtatgtggccttggcactgaatatcattttacgttaccactaactcctcgcagaatcttgtgtggacgtttgctctcttctggtactgtatctacaacgacttcgattgctcctatctcttcgattatacctacattatattggtcaatctcgccttcacttcattgcccgtgatcttcatgggtatcttcgatcaggacgtggacgataaggtgtctcttgccgtgcctcaattgtacatgagaggcatagagcgtaaggaatggtcgcaacttaagttctggtacttggcatccttcccccagtgttccgagacatactaacttggataggttgtacatggccgatggcatgtaccagtcaattatctgtttctttatgccttatctcctatatgcgccagcaaactttgtcaacgagactggacggaatatcaatgaccgagcccgtatcggagttcttgtcgcgtcgtgtgctgtgattgctagcaatctctacatcatgatgaatacgtaccgatgggattggttcacttcgctgatcaacgccatcagtagtcttctcatattcttctggaccggcatttacacctctttcacttcctctggtcaattttaccattccgccgctgaagtttatggatcattgagttactggatcgttcttctgatgactgtactgatctgcttgcttccgcgtttcacattcaacgccgtccagaaagtgtttttcccgcttgatgtcgatatcatccgcgagcaagtgacgctgggcaaattcaagtatctggatgccatcgaagatcctccgatgcccccaaaagagggcgacgcgaaggccgcagcttccagtgatggatcagccacctcttcggaaatagtgaagccagtgcagccgcccatgaagcaggacactggaattcttgatgaggagcggcccttctatgctccatccatggccccaaccgcacacacccacaacccccgcagtcaaaatggcagcaacggcaccaactacaccgccagtctcgaccattatccgcgaccacagtccgtggactatgttcgccgatctcacgaccggacacggcattcgtttgaccggagccgaccgagcttcgagcaaagcaacgacttcacctccgctgccatgctttcccgagtggagtcgtcgcaaacctcacaccgtccacatgaagacccgttccggactcctgacgatcctcctgtacataataatgtgatatagaggagtcgcatcttgcgttgcatggagcttgatgacccgtcactgatgactttaccaccgtcagaccttctggtttgttccttgcggtttctcctcgccattcctatcttgacgagcgatatgctgtggtgttttgatttttgagagccttttatattccctgatagaaagcaggcgttctggtttactactttactcggtcggatgcttagcgcgatcttcgtttttacctccttcactcttaccctttccttattatccacttcttccaatatttccgtttcattgttctgatgcatgctctacactaagcctatccggcctatgttatatttccttgtacaaaagcgtttctgtccctgcaaagtgcatgacacctgcgtttgcaggtttcctcttgtctggttcccatctggatgttatatcttgtcgaatgatcttcttgcttttgttttttgttcatgtgttttgttggtctcctcgatcaaaaaggacaagccggcatggggggtggtcgtcgcattcgtgtattctattcaatgccttcagcgaggaaattactcaacgtggctacctactgcgcagttctgctttttccaaagtgtagttgctcaagggtatctgccttatgttgcagtcttatattagataaatatcgcgacttccacatagtgtcccagttgggtaaaatagagcgcgtctacgcgttgagagctgcttcaccgcccggataatctgccaatgacacttcggcatctcgggtttgctctggggatttttgttcgccatctcctcctcgtttgctttggctaaacacaaggaaagtctcattctttgaggcagaaggtgtttaaatcttgccgcctctccaccgcctcttctgtcgccgaagtctcagcatatagtggtcgaatacggctcttggttgcgaggccactcctcgctgctatcaacattactctgtccttcgtttgagcctgctgccacttcattcgattctctcatcggcagttgatcaaagcctatgcaatcactttgatctcagtgttccttctcggcaaaacgatgtactagctgctttatctatgggatgaaggaaatgcaccgctgtcgtttcaattcaactatctccacaattcgagactacactcctcatggagtttctggctgcgattaggtaggcccgaggaaattcttcaaggcatatgagctagaattaaccaggttccgtcttgtacagggaactcaaggccctcccggaggccacccacctcttctgtccccggaaagacgacgatgatcatggccgctacgaagatttagagcaagtggatgaagcgggaaaagcaatcaaggatatcgtggccgaagcaaaggctcgaagggagagctttctctcgtccatgcgcatccttgcataccataaggatggcgtagaggacgatcaaaactggatcctcggtaaactagacgagtcgctggagaaatgtgacctatgcatcaagcattattacatcggcaagatctggctcatggacttgctgaaggaggagaactatcacgaagatgatattgaagcatttgctcagagaattgatgagtgggacattcggagaatcactcgcaacttgacaacagccacaacacagttgaagctaatcccgttggagaagattggcttggatgtcttggacagggctgcgttgctgtcaatattcgagacactgagctgtgaagccatgctgcgcaacgaaagcctcctgcaggaatattttgatgagccattcaagctcattcaaacaaaacgaagcttgaaagtttcagattatattcctgcagtctctcgctttctgtttgattctgatcagtttcgaagcttctgggctgttcagtcatggacgcgatacgcacggcctcccactactcaagaatttgaatgggcggtacgcgatggcttgttgatgggcctacgagctgcttcacaacaaccaccgcaatttgcagtgattcagaggttgtggcgaggcatgcagcttgtcgtccgcaagctgcacaaggagcagatcacacatcagctccggggattagagatagatccctgtcgcctctcggtggaccaccttgccatacctgcgccgggcttgcggttccttctcaacaccatccagttattccttgagaaggcccctgttgacttctgggatgctatgcaaaccatttctcctcaagcaatcatggagcatacattttacaacacacaatttaatgcatttctcctcgaaacctccgagggtgagcctttcgaaaaatccgcattgaaagacatgctctcctggatcaatcctttcctcggctccctgaagggtgcccaccagccgtctgcctgtcggttcttgacattgcaattacttggccgccttcaagatacccaataccccaatttgtcaaggtatcactgctttgatattggcttggccagcctccttcagacactacgccgcttcacagaaaatgagtcttcccggggtacagttactcggatcgtgttggcagagacaatgggagtggttggtgatacaatcagcacaatcatcaaacccccgacttttgatgttgagcgaagtcggcaggaggatattctcacgcagtgcatggaagttgtacgcaacacattggcgttggagtgccagtcattgaagactgattatgaggcacttctgaaagacggtaccctctcacatggagtatctacttactcggcgcccatctgggatgctgtcatcaaaaacctccatcgggacaacctgccactgtcaagttcggcactcctaggaatcttgcctctggtggggttggagatgtttcccacgaaaggagaagggaacaaggagaagacccacttcaacatgatttatggccatctcaccaacctctcatgtcgaatcatcggacgtctggcagacttcccacccgagcaccttgaaactttgttccgaagtcaggataccagtagcgctgtgatttcggctctgtttgccgccgactatgacacctacacagctgcggttgacctgatcaaggccgtcagcggccagtcagctcgacgagatgccatttctcaccttcttcaatcttcattcacgaccacggtctacggcctcagttggtcattccgtcggatttcttacatgaagacgttcgcgccagccccaagaatgctatacactggtacagacatcgtagagatattatgtgacagtcaaaccggtatgctgcgaactcgtaatctcgctggtcgccgggaggtcatgtcgttgcaaaggctctgggagtatttgtggctggcattgactacgatctttgatgagaccgagacatggcaccttcggggtaatgataaggctgtcatgctcgaattttgtcgtgacacgattcaattcgcggaccttctctttgatcagtatggtgttttcttgggagctgtagggaatgcggatttggggcagacctctgcatcggaaattttcctcaagtcaccaactgccaccatgagtgccatggtaaaatggcttaggttgaaggatgagttcctggcaacgacgctcgtagggttggtggcaaagcttttacggaggctgggtgggatgaatgtgaccactgtgaagccagatgcattgagctttattgagggggttgctgtcaacggcacaatcaaaacaatactcaatcaacgtgagaaggcagaattagtccgctcattggaggcgtactataagaaacccgtcgtcactgcctcaactgcttctctcaagaaacagtcttcgatcaccgctttcgccaaaccctctgatatctcgagcccctcctctcgcatcaccagtgatgatgattttgatgatgagaatttgaccgaccaaactcttcttgaattgtcttcttctgtcgaatttaacaaagctcgcctcgccacccaagccaaacggcaagctgaaaaggccgccaaaatgcgatcctccacggctgtcaagcatcgccctgagatgttcactccgggcatgtttcccaagtcagtaccccctgtgcgatccggcgatgacaccacccacgtcttgtctttccgtgagaagcgcgaacgggaaagggaggccaagaagaagcgtgatcagattgagcttgccaggctcaagaagaacatgcccgcatatggcgttggggaacaaacagctgaacaaggctctggcctgaaaggtattggtatcaagggtaaagatcatacaacccccgcagatagcatgatggtttcctctggtgatgagtctgattctgagagcgaagatgaattagacaaggaactctttggtgccaagccgaagaaaccggacgctgtcgcggcttacgaattgagcaaaaaacaatcccttcaacagcaacccgtcaaaaaggtcaagcgccatcggtctgtcagggacatgcgagctcgcctggctccagatctcggttctcttcaccactcaatcctctcctgggactttttcgcaaccggcgatcttcctcctacctcggaccgcactgattattccctggttttaaacacattccgcacacccgatgactatcagagaacattcgaacctttgttgattctcgaggcgtggcaaggtttccaacaggcgaaggacgaaggttctttccgacccttcgaagtcaaagtcatgacccgattggctgttgactcgtggatcgaattcagcactcagccgctcggtcttcctcctaaggatttcagcatcggtgaaggtgacttggtcttgttctccaactcgcccaatctcacaagcgacccgagtgcgccccatgttctcgcgcgtgtctgtggtgtcaatcggaagaacaaaaagatggaggtcacatatcgggtcaatcccgggagtaacaagttcctgtcttctttcgggccgggaactgaggcttggggcgcaaagatcacttctttgacgccagtggagcgtgaatatggtgccctgatggcgttgcagtactatgatctatgtgaagagatcgttttggctaagccttcacctcttctcacttattcagatgcaaggctgcagaccatcatggacaattactccatcaatcgtgctcaggcaagagccatcaagtcagctgttgacaacgacgcgtttactctcatccaaggtcctcctggttcaggaaagaccaagaccatcaccgcacttgttggaagtctcttaagcgacgtgcttggaaaacaggtggtcaaagttaatggtgcccctgttgcgagaaatgccctctcgaagaaacttctcctgtgtgcacctagcaatgccgctgtcgacgaattagtcatgcgattgaaggatggtgtaaagacgactcatggtcgccaagaaaaggtctctgtccttcgtctaggaagaagcgacgcgatcaacaccaaggtgttagacgttaccctcgaagagatggtcaatgcccgtctgaaccaggatcccagcaaaggaaacggcgtcgacttgcagaagctctatgaagaacataagacgactgatacatcattcaaagagctccgtgcgcggctcgacgaggcacgagcgaagggactgcctcctccggaagagctggagcgcgagtttgacttgatgaaaaagaagcggtctcaactgagcacgtccattgataaagcccgcgatcagaaccacacgctggcccgcaatgctgatatgcataaacggcggatccaagaacaaataatcaacgaatctcatgtcatttgcactactctcagtggctctggacatgaaattttccagagtatgaatgtcgagtttgagaccgtcatcatcgatgaggcggcacagtgtattgaactcagtgctcttatcccactgaagtacggctgctcgaagtgtgttcttgtcggtgaccctaagcagttgcctccaactgttttgtcaaaaatggcctccaagttccagtatgaacagagcttgttcgtccgcatgcagaaaaaccaccctcaggacgtgcacttgctggatgtccagtaccgtatgcacccagccatcagccatttccccagtgtgacgttctacgatggcaagctgcaggatggaccggacatggctacgcttcgccaacgtccctggcatcaaagcgagcttcttggtccttaccgattcttcgatgttcagggcatgcactcatctgcagtcagggggcactccttggtcaattatgcggagttacaagtagccatgcgactgtacgatcgtttgatcacggacgtcaaagaatacgacttcgcgggcaagattggaatcatcacaccctacaaaggccaactgagggagctcaagaaccagttcactcaacgatacggcgaagacattctgcggaaggttgatttcaatacgactgatgctttccaaggtagggaaagcgaggtcatcatcttctcctgtgtgcgagcatccaacaagggtattggtttcttggctgatatccgtcgtatgaacgtcggtctcacccgtgccaagtcatcgctttgggttctgggcaactcgcagtccctggaacagggtcagttctggaatggactcatcaagaacgcgcgggaacgaaatgtctacacggagggtgatattatgaaaatcctggaaaagccgcagttcactggctacaaggagattgaaatggttgaccttgacgcccaagaaacaccaggctcccccgactacgaaccccctgcaccgcaaatctctcgaccttcatcagcctctattggacttgactcgcgctctgtctcggtctctgcctctgggcgcggtacatccccaattccccgacctgatggaccttctgggggacctaagggtttagacccgacgaaaatgtgtgggatatgtggaagtgccgaccatttcacccacaactgtgacaatgacgaggcaaaggcaagtgctcgaggaacctgtttccgctgcggccagtctggtcacaccaaggttgcctgtcgcgctgaacgatgccttgaatgcggcgaatgtgggcattcgtccctcaactgcaagtccacgaaagttctttcaaagttcgagaaatctcgccttgagagagatgagttcaacctcaagcgacgtcaagattcattcactgagcgtcagcgagagcgtcaactgggaggacacaatcccaagatccccgttgttcaagccacaaattcaaactcgccagcgaacgctgttgataattccgcgaagaggaaacgtgaggaatctacttctggtggaccacaggcgcaacgtcctcgtacggggcagcctcgtcccccagtcaatgctccaaggggcccattgggtcttggccatcccggtccgtccggtcccactgctcgtggtccgattgtttccagagtcagtggccaccccggtctttctggccctcctcgcgacaatccggtggccaatgttcgcaatggttccaagggcccgccaaccaacggcccaccagaagtgagtttttccgcccactggatcgaataactggctttcatgtatgctaatagtatacaatttcttagggtctcatcaaaccttctcgcgacgtccaggcgtatccgagcgaaaatgacccgacgagggctccgtcaacgaggccaggaccaaatgtaagcattatgctcttggcttactttcagattagttactcataccgatttcttatcaatataggctcccaatcaaggtgctaccaggccccgacccccgatggtacgcaaaaagaaggagacagatcctttcatccgacccaagccaaagcgcaagtaagcgccgcaaatgcccatttcgatgtacttgtgagcatccacatgacgctatgtcatgtctgtcacgtagttgaacaaatagtattagataccaatgatgaatatcatcttgacatgtatcttccctggtctttccagcgttacactactacccacattctggtcctctgatcacctcgccatgtcatcaatccttccctcgacttactttccgagagagatgcctctttgtcatccacggaaatacgtccagatcctgatgtttccgaggcacagattatcggccgcttatacccgtggacggtctttatccttacataggtaatgaggatgtgacctaataaatcgatctagctgtaatcagcgcattaccacttgacgacttgtaatgctatgaaagaaatagggtgagcaaaacgctagaatacgcaggtagggttgtcgagcgattgactatgtatactacctagtgattgatatctgttgatcatgtttcaattttggtattacagctgcaatggttaattatatctttttcgatatttgtggcatcttttgcagtatcttttcaggtgtcttcatattattgttgatatatgttgaggcctagggaggtatcaccttgctcaatcattcatttcatttctctttcattctcacgccccgcgcatttacatctctgccaggcctaagccttgctcttcttcatttatttttttgacaagtaattgtccaggaccgatgtgatattggccaagaacagccagctagtggcgccactggcggctagagactgccgtaggtggtgcacaggtgacgtgacttgatcagataagattgctatcagctgatgttctccgcacttctactttcattctgctttcttcgctctgaacctctggaaattatttcgatgccaacttgtctatctgattagccgtcatgatggtctctcgttcggcctccgtcctcactggcgctatcgcactgcttttaccccttgcggcccacggctttgttgtcccacctccagacaatctccaggccttcctcggtgcaccacacagtgtggaccaggggccaaactctaaccatgtcgaagatcaaagtgccttaaaccgcccgtcctggtttacctcgactttgatggcccgccgcctgcttgcgttgtcaccctctggcgtcatctccaccaacttccctgagtccatcccaccctccgcacacgccccctcagatgttgccggtctctctatcgcgctccgcgagtacattgccgattgtgatggatccctgccctcggatctgtctcacgatgataacggcgatccaacaattcttggccttcgaattggaaccacctttaagaatattgcagcggggtctaatctcagtctccagttagactggtgggatcaccttagcgaggctggtccggtctatcctggtcttcctctcagcccggccgctctacctcgggtgacactctttggatacttggattacctcccgtccccgcttcccgatgacgcagctgcggccctcgaaaagtgttttctcgagcctcatcctgatgctaaggtctggctacctggtgcttcttactcacctcatgcgagtttctgggcccggttggtggtcacccatgcttactggattggcgggtttggagatgtgcagcagattgggtggatcaatctcacggagtggcaggggatccgaccacacgccagtgtagagggcgttggtgatggaagagggtggcaggatgtccgtttgccgggtgaaaagcagtagagagaatgcctaggtatttctatagggatcgacgaatggctagtgcggcgcagtgacgatcgcatgagtttcgttttcttttgaattactgcgcatgcagcatggatagcaatgaagcatatctctatatctctccaccctaaacgagttttacgaggtatctttgagctcttccttctcattcgtcccccttgtcttatctgcataatgcaggcttatcagtcttatcatccctgttgtgtacgggacaggtcgggggcaaatctggggattaagaagacgtcggacctgcgtctattttgctctcgctgtcttatgttttgtattgtcgagctgttccactcgtgttgtggtgagacatcagcctatacaccgaaagctttcggaccggggctcgaaccctccttatattagaacacccatctcaccgattcatcttcaaccatgaagttacgcatccctaggctgcatacacgggtctcacagggcgagtctgcatttgcagcaggcaatgcacgatggacaaaccttgacctggacccgattgccaaaaatgcgcgcaaatggggtgtatccagtataataggtacagcacttgtgcttatctttggcaaacatcagactagagctaacagaacatgtcgttagcatattggatctccgatgccttgcacgcagcaacctggcaattcgctagtggtatgattgccgtcggcctcacctaccgtgaagctctgggcattgtcgccttgtccttcttcatcatatcgttggtcatcgcagcaaatggtactgtaggcgccatataccatgttccattccctgtgattgctcgtgccagctggggcttttggggctcatatatcgccatcatctcgcgagtcatccttgccattttctggtttgctatccaaaatgttaacggcggaaatgctgttcgtgtcatgattggagcaatctggccaagtttcttggaccttccaaatgctattcccgagtcacagggaatcacgacagccggtatggtcgggtatttgatcttctggtcgatccaggttccgttcctctgcatgcatccaaataagctacgctggttatttacggtcaagtcgattctggttcccatcgcctggatcgctatcttgatatggtcgtttgtcaccgtacaaggcggtggtgaagtattcgcaacgcaggctccaacagtctctgggtccaagtatagctggctgttcttggccaatatgacgtcggtactgggaaactacgcaactctgtcagtcagcatgtccgatttcacccgctactcccgcgtcagtccccagtggcagctcctttatatccctatgctgccgatcgtattcaccttcttttccttcattggcattgccgcttcatccgctggccaggttcactacaacctctcttctatcccatgggacccaacagtcctgattagctactggtccaaccgcgcgtgtcgctttttcggcgcagcttccttcgcactagcctccttgggcgtaaacatctcaaacatctcggccaattctctttcggccgctaacgacttcaccgcactggcaccacggtatatcaacatccggcgagggcagatcctatgcgccttgctgtcatggtgtcttgttccctggaagatccttgaatcggcaagcaacttcctctctttcatgtctgcatatgccatcttcctcggtcctattgctgcaatcatgatgtttgactattgggttgttaaccgccgtcgatatgactgcctcgctctatatcagcctcataacccgacatatcgctatacattcgctatcccgggcctctcgcgcaagagtatgtctggcacgaactggcgcgccgtgttgtcttttattgttggtgtcgcaccgagccttcccgggctggccaacactgtgaactctcatatcgatgtcggtgtgggtatacatccatatgagtttgggtggctgttgggctttgttgccacatctattgcatatctgtcgttgtcatggctatttcctgcgcaggagactcggatcgaccgtgctgttctacctgacgagatatacgatagggatatgctggtcgaaggaatcgaaacagatgatgcagacgggaaggatgtggttcttgatacacaggataaacatatggatatggaaaaggctgtctaagctttctttgatattgatgtgaatatccatttggcccgagccgatatgaaatgttatatttgatgatactatgttgcgctctttaatgcatttttcagtgtgccctttctatcttcatgttgctgccagaatggttatattttgtttgatatttagggcagttatatggtcacgtggtagcaaggtgaccgatcagcacggtgggacctctgaaatagtgggctagacctttgtacccggatataccgccctccaaatcctgccgattctgccagtctaagctcctaatatagttagcgtgtaggcacgtgattctgaactaacggttagcagtgaaaggtagttatatactcaaggagactactcaagaagacgactaaaaagacgtttcagaagactacctgagaagacaacctgagaaaccatgagatgactacggccggataagcggccgactatatattctcgtggcagtatctttaaaacggaggcggtagttatacagggcggtaatatatgggcacaaaggtttagcccagaggcctaggttaagcatttgcatccatattcgacgggtatttcatcaaatcaagcatcggtgatatgcgagaaagcaagaagaacttgttagaacgcaccctagtgtattgatccaatactaatcaatacacaagattggtcgcagatagacatgggacttttgtctgcatatgctcaagcactccaggattggaacaaaagcacgcagctccttgcaaaaggcaatatgtggatgatatgtgctatgcataaggggctccactctatacttagaaacagggctaataaccgggaatactcccacagccacatgagccacagccccacccagccacagctgatgcctggatgactcacagcggaacaatggattccccgttccaatgttggaaggttgcatggtcagacgtcctgtcatgtgccttaggaatacgaggggagccgatatcgctgttaagctgtatttggattgactatcctatctgagggcgaggaaccctcggggatggcccatataccatcccctagatggatgagttgatacaggtgtaatcagggcagacgcccgctttcccccaataaccagagtaaaataaaagaccataaccgtcccatgccgaccacactccgtgcgcaaccacaaaagtagatgaaagaaaggggaaaaaagtgagagaacagatgcacgatgcaagtagaagacacgccagtcatcaccacatcgtacacttcgtgggaatcaaacgcccaagtcccaatagtacgaccgagtacccgataataggggtatgtacaacggggtcagatcgccgtagggagaaaaaaacacaaacagaaagacggactttttctttttttcgcctcacacaaaggaaataagaaaataaggaaaatccgctaataaatcgcaagtcaattcaagtactccgcaacacggaggcttgggttcaacgcgatcttgcgtgcttcgctgccacagcaggcgcgtttcatgcctgctggtccagagactgagccagtctgcacgggggtgatggaggacccatgttgcgccatgaacgagcgtggaaactgcccatcgggcaacacagtgtggtctccggaggtcccgaggtcgatcagatgacgtacatggttttggagcaacagatcgtcggatccagtacgtccacgttttcggcactggcgccgttcgggcgtagcgcctgaaagttcgcagagactctgagcggcttcgctcaggctggaatccagggaaaaatcagacaggtctgggaccgaagtacccatggaactaggatattcaggggagctgtagacgccgaccagacaactctcgtcaatcggagaggcgatagtcagagtcttacgggactccttgagggaattgctcgtgcagcgcaatgtagccttaacagccagacgggctggcgccgagccagaagtaccggaggcgttggaagagactgatgacgaccgcgaagagctggacgacagggtcgagacatccgaaaccatcgagtcaggcgacgatgccgaggaggtcgagcgagccaaagatgatcgacgagtcgcagccgggtaaccatcgaacgactgagtcctggggcagaatgacaagggcgggcgctgatcgagtgttgatcgcgccatgcacgcactctgcgcctgggacatggccgtacagatggatgggcggcgggtattataagcagccacactcgcagcaggagtggcggacacttgagattggggggtcatctgaggcgtgggaagcatcataggccgtggaatactaggcagagccaagttggcgtaatccatgcgcggagtcggctccagggttcgcggaagactccgagcgtaagtcggagtttgttcgcgcgacgaggagcgcacagtctcgttgattggcagactgcgaggcgaagggtattctgagagaccgagatccatcccacccattgccgagactggggtcatgggctctgactctacaaggtccagttcaggggtgagtctgggtaggacagtctgccagcactgacctttagtaaccgggggtccaccggcaccgggggtcagcttcaagaccaaatcagtccagcgctgaaacgttgcttcatcgatgtgcaggcgccatccgacagccttgaggaacataagctcattctggttgatctcgagagtattaagcccagaaatcttgctccatgcacgagcggagtagttgcgatcctgcagatactttgaagcgagaatcaacgctgccaggaacatccggcgtccacactgcatcgcccgcaaagaagactgatcccgaggctgctccttggtgaaatcatgcgtgggcacatgcggcttgactttaatcaaataatacaaagccacctgcaaggtactgtagctagtacgcgagcggcggagtgtctcctggataaaagtgcggagaggaagaacccctttagatccggtcgcggcatcgctgcgggacgcagcggcggaaaggggccagatggtttcaacgatctgtgatgcggtgtctttaaaaggaggggggagtattatttagctgggtgtacaagacgtacgtgaggagtcttttttttttcaagacttaccgacgaggttgtcgacgaagttcaccttccgttccgactgccgtagcagacatggcggagggcgcgcactaggagcgctagaagaataactgttagtgcgccgagggtgcgttcgcagctcggatggcactacaccgtccaccttggaagcaggtcccttggcaaaagcccgggggcatgctccgttcggatttcttcccaactggctattattctcattttcccaaatcacgtcaaccgggttggtcgatgtcgatgatatcgagctctgcgaggagacgcaatccagagagaatacagatgaggaagaggaggaggcggaggaggagatcgaggatgcgtaggggtgagcgtggtgagacgctgtcaattgagagcttgggtttgagaggttcatccccaagacgtccatccctgacatatccggaagtactgtggagttcatatagggcgtttgtgtgaacaaagttcaaatgaagacaaccggataaaaagcgagatggtccgatttttggaaccgtagtgtcaagataccgttaagcagggaaccgggaacgagggccgaggagacagaagccgtctttgcgacgaaaggcgacggcagacctttaaacgtagagatccaggttgataaccagatgtagaagaataagcggaaccgccgggtgtagcggctaaaaagagatcaaagggggtaacaatcaactataaagacaagaaaaggaaaacgtattcacgatccgatcaaccaagtgcttctgatataaaaaccaaagcaggggcacgtggtagtatgactctttttttttttgccgagtgtattagatggaaccagagacggtgacgatgcggaggtcggtaacggcagcacaggcgatcggaacggatgaatcaataaggtacattttgaaatgagtcgtgtgatagaaaagaagttatatcaaggcatccaacggggccgtggacaggcagaaccaggctggtggctgtctgaacaaggcagtcgttgaagcgggctaggcagagagggaggcgagagtcgggggagaggagaggctgagggggaggcgagatgggttagcggaggagtcagaaggaaaaggaaggcatttatggaacgacattacctgtgactcttttttcaaaatctgttctttaagttgactaagagagggggcaaaaaacgggaaggggaaaagaatagtcacactgtggcgagaagaagtgggtggcgggttaggaagatgccgggaggcgcagggaccacacgtatatagaaatagaatatagtcaaatattctacttcttttgtagatgaatcctatttagaatcgtagaatcagaagaggaacattgtgaagatggcgtgagagggaaaaccccggatgcggcgaagagactccgagataggagaagccctgggagtggtacgacggtgactcacgtttctatcgcctttttttatatacatacacactattaatatactattaatatgctattatattctatattagatagtctgatatcttctatcttatagatgttctatatctatggatcactatcatattattatcattatctaggcataaaacgaactttgggagtgactttgaccatgcagtggcaccttaggtctgtgtagccacttatagtgtgatttagtcttattttcggaaaaagtaccatatgaacaaatcagcaagggaaaatattctgaaaaagggttcatgttcaacgaataactataatccatccattctgaaggttctgtaagcactgtccaagttcccactgagtcataaagccgcttgccacgctgtcttcgcatcttttggccaatccacacgcggctgttagactgtgatccactatcattcccattattccaccattacctctatgctgattggttgaccctgcgatcggcgttgctggttggggttgcctgcagccttcatggagctggggaacctcgggagttctcaactcagatgacctcacagtgggaacttaggctgaaaacaaagaaatgttttactaggtcaggcttcaagttggatttctcgaaagttcggatatccgttagagataactgcagggcaggtggcgaaatatgcgggtagtaatgtacaacaataatgtgagaaagcttccaaggttggaaacaagaaaatcctcaaaattgaaaaatatctccataacatatagtgataagtcgatccaggtagctatttggcacgatgtacacaagctatctacaacgatgcaagcacctctcgcaacacctctaccagcccccgtacttcggcctctgtcttcgttagtatcgaacgaatccaaccgagctacccactcaccggtgttatagtgcaggaagctgacccgcaccaccccatcctccacatcctccaatccgcacacgtcggccagtagccggtgactgtacatatgaccgctgcggaacccaaaggccgatcgacgctcaacctcctccacaaggcgctggctgcccactccctgcacaacaaaactaataaccggcacgcggagctccttgctggccgaaggttcaccgataacaccgacccggctattagaagctaggaactccagtagaatctgctgtagtcgctcttcgtgctcggccatctgggcccaggtcctgctagggtcggagccaaagtactccacaacctcggtgatactctgtgtaagctcataattagccgatgcgaggttgagcttcaggtcaagtgtatctgtgggcttgaagaaatgccccagtgactggatctgatcgtgaactcgtgatgaggcatatagctgtgccaagtgtggtccatacaccttgtaccaggagaatgcctatgtagtggggtcgatcagcaatgaaccagtcacccaaaggtttgggttgcaatttacatagaaatccacgtccaacgccttcacgtcgacctgacgatgcggagccagggccactccatccacacacagcaatgcctgtatatgtccgtgtgagcaaatgcatataaaccagtagattccttggtcactcacacgaggataaacatgaaccacgtctgcaatctttcggatgggactgatagtgccagtgatattggaggcatgagggcatgctacgagtctggtcttatcagacagcagagacttcaactcaaccgggtcacacactggattctttgggtcggaagcagcccaccactttacggtcaagcccaacctatctgctatatggacccacggggaggtattggcctcatggttgagtttggaaagaaccagttcatcaccagcttggaatttaagcgccgtagccagattgtgcagtagctgggtggttgagataccaatgctgatctgtttccgattccatgcgttagcacccgaagtttgacaggttcttacatttcttgggaagtatgcgccatggcttatagtgcagatacctcctcgggcgcggcgttgatgaacccagcagccactttgtatgcattgtcgtacgcattagtcgaaatttgggagactttatagctggctccgagctggacattcgtgttcagcagataagaacggatgctacggccgcgtcagtatatagcaatctacaatgacgccgattggactaacgagtcagccacagtatcaagaacctgacttccgcctgtagtttaacaatcagcacaaatctcaaaattaccgcggctatgaaatgaaggtccacctcaccagcattgtccatgtacacttgctcctgctgcagtgcagggaagcgagagcgagctgccgaaatattgagagcagaggccattttgaatattgtctgatccacttgatatagcttgataatagctggactatttaagatgggaattattgcaagatatgaaggatatctgcccacttaatagttgtctgttgtctggcatagggcgtgctgagaggggtaaacagtggagctggtaacggatttaccccggtcccaagctaaatactatgtacattgcgtttggataccattccatattgtggttctggttgggggacatgccaactctacattctagagcttgcggtcagcacatctacatgaacagccctgaggaagcaagtaggttgcctcactcaaacagccaacccccttgcccccgcagtcatccctacataaagcaatggaaaaacgacgttatgccagaacagtacagataggaacctatatttggcaaaccatacatgggccgtcctacacatagccatgacatggaaaacatgaattaaatgcgaagattttgcttccatcgggtatatgtatgaaatccaaaccaacaaaacaaacccctgcaagagacacaagaaaaccccgaaagaaccacatgagagcagccatatccacaataagatcaataattccactaccgggaacgtgaactcgctgccccagctccaccgggggaggcatcatgtacgacgcacagcaggtatttccgatccggcacgacaacaatctcatgtttctttgtgcgcattcgaagcagcttcacttccccgtcctcgtcccggtcaacaccatcgccgtcccggtcctcctcacgtgctgcgcctgcctcgttcccgtagtcgtagttaacatcccaatggctgtcactggagcgctgcacagtgggcgtgggccgcgatagcgagataccgagtgcctcggcactggagacaaaggcgaagatgtgggcagctagtgtctcggcttgcgagggttggtagggctgtgacacggtgggcgaggcaggggatgggtctgtgggttgggcggcggagagggggttcgagtcggttgtggattgggggatttgtgcggtgcgagagcttccattttcttcggtcgtctgtgctaactgtcctgtgctttggatgatggatccatctttgcgggagagaatcaaggtggattgcacgcccgggcgggaggtgaggtgtgagagcagcgtggtgacatgctgggggacctgctgtgtgcgctttcgaggtttgtcagaatagttggcgcatttggaggagaaattgcacttacttggcctgagttcgccatgattggggggttccgcggggaatgtgaagagtgctggtatgcggtgagagaggttatggttaggggtgggttagacgagcactgagcatcccatgtctttgcaattgctgtttcggctacgtgttttccttcagccagaatgattgaagcacatggagttcaagaagttgactgcttgggcgtccccaaaacaaatgactaagcattgcgatgggcacaaaaacatctataactagatgaatcctgtaaagatctccatgtaagctcttcaggtactagtaaaatataaaaacccaattaataactcctcttgtaaattaaatctaccaagtagtttcagttatatacgagggggtttatacggtcctacgtcaaccttgaaaggactagaaattatatagatctaagttgttgctgcagtgatatatagcgcaaagttcggtgcaataatatcaattaaaaagagagtaaaacacaatggtatcatgggaaatataagcaaagatagacagggtcgggatatgtagaagtaaaagccaaaaagatcatcataagccaataaatgagtaatatggttccgtcagaagtaatgaagatgtaataaagaaaagaatataaggaaagcaagggaagacatcgttatttatcgtttgcgggcaattcgagttccactgagactggacttgtctgacagccaaccagtctcgatgtcttcgatcatgttgtctagctgtttgacgctcgcccggccctctcggtaggagctggaagtctcaaatccgctgtgctcactgctgcgagaagagctgacccagctgtcaggccgtgatgtattgcggccgggatattggtgcgcaaagggagcgtgtggggagtttgatgacatgttcgggtcaagattgagaccctggaaggggttcttggctccagcattgagcgccgccataagagcggcctgtagaatctggttctggcgttccagattcgccacccggtcttcgaggtagtgatccatttgaggagcagcgcggatgtgttgactgctttgagactccctcgatctgtgggttgattgggaatattgtgactgaggagacgaagccttctcaagactgtggatgctgcggctttggggtgtcatagggcgcgcgggattggggtaacgaagttgattgcgggaggatctttgccgtggatcatttgcctcatatccccggcgcgttggctgggttggctggtagttgtcggcccctcggcgcgagtgtttggtgtctatctctgggccaaaaacctcgtcgtctgacgatggaagtggggactcggggcgagattcgggacgactttgctggtatgtttcaggaaaactctcatgtcgaaggctgctccctgagctgttgctccgggataacgccgaacctcggtagggccccggtgtagggtatgcctccttgtttctcattgatggtggagtagctacattaggtgcagtgtagttgcgctggccaatctttcgcccaggaggcggaggaggtgggtgctgaggaggtggagctgatgggagtgatgcagtgggtggaggcgatggcagaccaaatggaagattctttcgactgacttgggaattgatctgaagctccttcagagcagcacgtttgccattagactttgtagggatagagtgccctaggacgggagagtcggccaaaggctgcccctcggagacctccgcatcacattgacttgaaggactttcggggagttcttgcacccgagggatgcgcacacttgaaacacgtcctctaggagtgcaatgttctggggttgggtggtagtgttccgaaagcgaagtggtcaacaagctttcctcgtcatcggccattgaccctccagcaccgaggctgcctagagcggttgccgggcgcgagtcaagggcacaaggactgtcgatagcggatcggatttcctgatattcaaccaatgttgcagaagaagaatgcaaattggaagacaatgtctccgaatcaatcgctcgactagagcgcgtgttggtgtccggagcagtcggcgagcatttggtcttgggcactgagggcaggggccttgtaggcgctgggagaggaaatgcttgcagtgtgcctagggacaacgaaagcggtcgaattgtggtctcatcttgggaggcagaatcctttgaggcgtttactgcagatagtgcttctgaagaggttgcacaaggtgcaagggcatctgggtactttcgttctgctgtgctgactggagcatctatgaaaccatctgatgattttcttggcttatctggaactttggattcgttgtcagaaggcccaattcgtgggctggccaccggagatgccggcgacgctgtggtattttcgatcatttggtatcgaggaatggatgaatttctccatgggcccctgctagatgtgcgaggaggtgcaacatctgggaaaagtttcaaggtaggcgacaagggtgtgacattgcggacagaagattgttctgactgatttcgcttttggatatcgatagacggtttaggctctggctttgtcctatccccacccacggatgtattgatagtgacttgtgagacagggtcggcgcgggtacttgactctgcagagctagatggccgttggatttgctcatcaattgacatattcctatacgaatgactggtagaagccaacgaggaagttggtcgggtgatagtctgaggactggggtctgctgcagaacttgacgtcgggtaagctgaaggggattgggaggtgtgatcggttggctgatatggcggtggcatagaatcgtccaaatcggaagtgagtgagactgcaatgtcgaccattgagccaaaggcagcaagatccagagagcccaagcgacgtcttgtctcagtcggtcgtctgtcgcaatcgactttggcttgcagccatggctgtccaatgttttccacatctttctttgatctggaaagtgatcgagagagagatagtgacaggctttcttttgatcgctttgcctccttttgcgcctttgattcatttggaggagccgctgggataagatatcctccccgtgttagtgcttctatttggcgctgctgctcttcttgctttgacctgggcgatgattccttctttgggcgctgggcaaactgcaagaggcgacgatgaaatggcttcggatcctgttttgaatctggcttcgagtctgacttcgattctttaggcgaaataggaacagggagtgcagtagttgtatcagaaggacttgagggttgaggttgagagggagcgcgagagcggggttgaggttgggatggaggtagagatagaggcggcggctgagagggcatattttggctctggaggaatcgaaccatgtccactaggttttcattcctaccagccctttcagccatgcctgctgatcgggcttcaggtcgtggggcactgccgcctcgaggcctgggggcggccagaggtttaggcggtggtccagtctttgtagacgtcatgttcatgttggggatcctacgtttcgagggaggatcaggtcgataagtccgaacaattgggcttggtgcgacggcgcagtcatgcggtgaatcaagctgatgcatagggagacggtgcatcaattcctagctggcttcgcaatccgacagttcccggttgtcgacatgaaaacccaggctgttcgtgtaaaacaatagacaattctatacttggcaggttagagagatgaaccaagttactagctcgggagcgaggcatgctcacctgctcaagagggccaacacgacaggggcctgggaggctatatagaggggggatatgatatgtcgacacaggttgataccactatgtaccaagagtccatatgtacaaagtcgacaagagttgaggcgtgggagaatcgaaacgagcgaccaaaagtcgaaactgcgagacggaaatagagagagtttaataggatcccaggtaactgtccttactcctgaaatagaagacaggagtattccgggtaacccctcccggaaggaaaggcacatatacaggctgaggctaaaacggggaagtacgaatccgaaggacaggtcctgcatataatgaaaaataatgaaaacgggttcgtccaaggggattcgtccaagtggattcgtccaagcaaggtcctgtggagaaccttgcacttttagactcgatcaaacagatggcacttgcgatgtataaccgggaaggaaaaatatgacacagcaattggatgacaccgggaagactgcttgatggggctgcatggtgccgtctgggtttcttttttttcttttccattgtgtttattgtggcagggacaatgctggccaaccacagattaatcgtcaattgaactgctttgccttttaattagcttttctccttgttccccttcgatatgaatgcaaggggggttaaagagagaaaacgtcaggtcctgtactctgttctccccaccttcctccccaatatgaggtatcagatccaagaacttttcaagccacttcacttagcgtgattttcctttttcccaaataaagcaagagtttagatcggagctgtgcagatcagaatttttagggatcctctagacgggtagaaacagtcgatcatggtcgatcatgaaaaaaaaagtacatgtagatcgggaaaatatgggtgagatagctcacacacaattcatgaactattggaaatagactagggaatcaataacatatttaatctaagttgaatgatttgactactgtaattatcaagatctcaagatgtcaatatgtcaaacatgcatgcactccatacaaatcacaccaggacagggatagacatgtacaaaggtacagccctgtggaactctgatatcattaatctatatcggcattataagtgatctagagaaagttaagatgcgttcaatttagaaataagattctgtgcaatcacaaacggaactcgaagtcatcatcccttgctttcgatgtcccacactttaccaacataggtagttagtacaccccatctctatgttgtatgtacgattgcctgcattaatctccgaagaaaaacgctctttttcatgcagtgttcgacttcatggttcttgattccccgaaattcaaatcagaatggaaagtagaacagtagtgacccacctacaagacatgtcaactcttcccctcttgtctcaaatgtgtaaagaggatacccacttccaagacggcaaagaatctataagcgaataagagacattctatcgtgcacatatcacagcaaatatattcgttccaaggcctggttttagtcttttggggatccatcgggagttgactcgatgggaatccatacatgtataacatttcaatgcgttggagcctgtccaataataggactttgatggttgtcctttttagcgtttgtaaagaaatagaagtccacttatctcgtccctcaatttctaaaaaagaaaaaaaaaaaaaaaagggaacgttcccatggatagcattagattattttgttcgtggttttccggctctccacctgggcagggctatagggataaatgactaagattgagggttccagcttaagactttagctcggagctttggtattgtatgtatcttgcttgtacctgctgcaagggcacaacgcccatgatcaccccggccaaagggcgcaccgaagggtctgttcggtgccgattgcagttttcgcagggcgaaaccatctgtataaggacagacgctgtggtattccagcccgagctggcttgaatcggacgcgtggttcactggtagctttataggtaaagcccgcaagaatctaggccccagcctaggcccaagtcacggtaccatcctattggatgaatttggttttgctcataaaccgtggctgaacaattcatggacctggtccatacgcaatcgcttcttttaacaccttgctcacgccggatgatgcacggcctaattcgccaccttcctctctggcgctcttgattccacgttcgattgctggctggaaacgagtcgagaacacacggtacctatcctcacgagtttcgtacatctccccttcctcatcgcgcggcttcccaaacagattcaggtatgcgaatggagtagatgagtccgagatcatgtgctgcgcggtctggcaaagggggaagggccagtccggactctcatcttcaccagacatttcactatccacaccgtcgaccgaaggttttccgatccccgcatccaaaaacatcgccagagccccaagcgttttgaccatgggcttgccctggctgccagacttcccaaatgaagctcggcttgaggaccactgcgaggactcttcggtgtgccagcccaacacggacaagaagcagttgagtgttttgatccaacctcccgcgcaggaaactgttgattctcccgctgcctcgaccatccatgataggatctccacggcagaactacggatgtccgctgcaagatgggtcattcctgcacgaacgtagggaaggagttgcgccacatggtcttcgacatcgcccggcggcagggtccgcaagagcttgaggagctgggtccgtacgctggtggctccatcgaggatgagcggcagtagagatggtagaataacgctcacaggttgtggtagaggagagtttactggccgagaggatatcgaggtagtcagataagcgagcgagtcgcgtcgttggctgtcagacttggcggagaggagagataagttatgcgtgaatgtagcatttgaagtcggggcggcgagatggagggattgttgtgtgaggacaattgctagtgattgtgagcataacaagacgtcaagcaattatagaaatgcacatacacttcgacttgaaactggtatcggtgtagttgtcgggcttcgctttggttttcccaaccttgagtttaggtttctgcagatgttagttggttgaagagaagaaacgggggtttgtaattctaacctggaaatccttttgcttatccttctttcttttagagctggatcccatggctgcgcaaaatcaattgattgttagagatggatggactgtcagtgattcttttttcgctctggttatcacacgtgatttatcatatcagttgttgcctgaggcataagccttcctgaaggggaagtatattgtgataatgctttttttcccgtacaatgttgtaggtgattccactttcggcttattaagagctacttatccatggatggtttataatccttttattgcagaaattcgatgtatacttcacacaaaccatgttgatatttcgaggtatatccaactcaacgatccaagcccgcaatatccattcggcatatattcgctatgaaggttggcacaactgaacacagattacactctgtgtacaatgtgaagtgggaatttaccggaccttgatgtgtgatttatttaaaataaaggtgtaggagaaggaatggtgcagccaaccctcacaatgaatgtataaacatcacttgaaattctatcctatgtaacaattcatttgtaatcggcttcatataccctaggtaggcatttaggttgcacctgaagcattctattagcaagaccaaataatcaagtaactaccacagtcagcaactaaccacgagaccctccgccaagggccttagccactgtctcctgcgccgactgcagcagagacttttccctctccagtccataatcacgctcttctctcggaccaccctgtccaaattgccagatattgtcgggtgtatccgacgtgcgacgagacgtcgccttcgtatctcctgcggaacgcaatcagtctatttagctggtgctcaagaaacaacacgtagttcatctccagagcaaatgtcatccgtcgtctgcgcaaagcccacgccctatcactgcgggaaatacgcaccgggttggaacttttcagctatcgtctcgcgcgcattactggcagactcatggacgcggccggtgaccctatctgtggtattcgttttggttgtgaatggttcggaggctcctacgatgtgtaagctggtttctgcatggcgggtagaagtccacaagatagctactcaccgtccgtgttagacatgtcgtcttgttgaaaagaatcagctatgccttgttaatgttgactggaagaggttccatactgcctttccagctgtcctgggtgttaagttgattgctggcttagtggtctgatatgggtttatatggcgcaaaagtaatatattttgaggaagcgcaaagaggcaacactgcccaactatccgtcaacatgacgtgtggattgtttccccggcttaatgtccggggatgaagttggttgtgatgtcattcttcgctcagcctgcagttgacgctggaaagaaagtagcacttagggcttaattacacctaagttgataggctaagcgtgtcgagagaatgaattggagataatcatgatcatattgaagtccaggtctaaaagtaatcacgcaaggatgagatccattaatcaaagcctgctcagcagcgcaagaatccaagaatagatgagtaaataatatatagaaaaaaagaaggaaaaaaaaagacaaagacgggagagagatgcgcacttctgcccggctccgagctgcgaaaacaaaacaaaaaagcaaacatagaagtgaaaacataataggcagctcgggtcccggacagacgcggttgtatcaatcaaatcaacgaaaaagaaaagcacacgtgacgtataataagcaggaaaaacatgagtgataaaggagccacgaccgcaggggacataagtcgtgtaatacgtgagattatagtggtggctagcccggtcacacattggcaaaactcagcagaagcaaaaggccatgtggtagaagccaactacagactcattgtcagccactcccattcctgactcgcaccctgtccaccggcgatactgtggttcgctgggtttgcggcagcgggtggtgccatcgccggagctaatggcacgactttggaccggctcgggggagcggctgacttagggctgtcgtccgcatctggttcggatccagctggtgctttttcgagtctgcgctgccgtctgggtgctacttgcacaccagcacgggcctgagcgacgccagccgggggaccggacttgggcggggcagcggcaattggcacaacaccgggtttccccaacgtgctggatccattgatcgagggtggagactcagaagtgttcatacgggaggatatcgatgtggatggggcatgctgaatggagttcttgcgggaagatttcttagatgaccgagaagtaccaacagtaagtgtgttggcgctgctacggtttcgcttcttgatcacatcagtcttgagcgaaagtggcctgacgacgccatggagtttcaggaacaggccacatgcattgcacagaggctggccctctgggttgcgtctccagagaggggtggtctgggtgaaacagttggtgcaggtggtcggtcccgcgttcgggtcaccgttcttcaacccaccagggctgcctggccgggagggcaccgcactgctgagaccggactccggaggggtgcttggtgatgggtggtttgtcggaggcccgctggctgagccattcaagctctgacggagcagtgcagcagcattgggggtcgatgctgtacgaggaaccttcccgtagcgacgagggtcctggttttggttgcgcacctcgctgaccgaagcagcggatccatgcgcacgaccaagagtacctccctgattccattcagaggggccatctatcatgtctgtggatccaatcgtaacatgcttgcggtgctgagcactgaagcctgggagggactgtactgatccggggaaacctccatcccaatgaagaccggcgctcatatcaacagactcatccaaggaggcaaagtcatttggcatggtaatgcctccgcgttcaccaaagttgccatcgtcatcctcattgtctgaatctccgccaaaggtaaacatgctgctggcaggcgccgttgtggagaattcgccgtggccaagcacctgtgatgggttgacatgctgcggttgcggcaccgaaaatccagacatattagtggttggcggccccgtaactgcgctccctgggtgagattcgccgttggacatgttgtacatataacggggctgcagcgatgcagacaggttcgactgacgctgctggatataattaggaatgcggcgctgggtgtgggattccgcggagggcgcatcagaaaagaatatcgactgctccccttcataaatcggttgcggggtcgacacagtagactggtagccagaaggcgggggtgagaagaactcagttgagttaagcgacgaggcgagcggcgtctgggcatatagactcgagaaaggatttcctgcagtcattggagaatctgacggcgaaaaatggaaattttgctgatatggcccggccgaattgagcccgtggtcttcgttgatgccatacgtatccagcccgtagggaatgttggaatgcgtgtgatggtgatgaggtcggcgcgggcccactgtgccattgccagaaagagcaaaagcagaaggtggatgatcgagagagtaatctggcagtgccgctgaaagttccgagtgctgcgccatcatagcgttggacaccgggggaacctggggcgaggcctcggcagggcgcttgcgggtaggaacagagaggccagcgaagaactgccgctcgtcgacgctcgttttgcggacccgacgggggacgtatccaaactcggagtttgttcgctgatcctggggtgggtgggggaatgaggcggcggtcgatgaatccgtcatcgcgtggtccttgcgcgatttaataggaattgatccagtgggtgtcgctgcgaagtttcgatcgaccgaaggatgcgcggagtgttcggcaggcgaatcaaagggaacgatgaagtcatccagattcattggatctgaagtggcatcaaggttcatatcgtgcgaaggatcggggccagcgggcgatacttggtcggacaagcgcatctgcgcgatgccgctcggtgtcgggctacgagcttccgaggcgctgttcggatatcagtaaatcagctatacgcttcaggattggcaggagcgtttcttaccgagcctgctgttcccgttccttgcgcttgaggttcatggccatcattcgccacgtcaaattctccatgcgctcttggttgggcaactgagactttgtcctggtatagagtttccaaatctgcgcggccagcggatctttcctttgcatctcatcaggattgtcgccacgggatgcaccgctcgtccattccggaaagatggaattgccgaggacaccatcattggcgttagaggaaccagagggactgaacggagtgtcgaaggagaagtcgtcggacaccatatgggaatcggcgtcgaaatcggggaacgccataggctgggatggccgggctcccccatgccctccatgatgtatcccctccataatctccgatggagaggggttcaatcagagggaagaagtaattcaaatagaggcgaccgtggggggaggggatgaacggcaaaaaggtgggttggattgaaattcctccgtacccgccgtaaacgagacccttgccggaagttgatgatcgaatgcagccaagcgagagacgattggcaggattcagccaacgaccagggtctgtcaacgcaagacgcctattagcacggaacggatcttatgataataatatattataataagataattaagctgacgactgggatgagagaaacgcacgatggatctggagaccaccacccagcctcgacgcctcttgggatttcctgatgagtcgtggagggggggctagaccctccagacgctcatgccccgaaaagatctatcttttgatggaagagaaaatccctccgaggatgacaaaaggaaagatgagaataaagtgggatgaaagaagaaagatggagaggagaagggaattgtgtgggaagacggggaaaacggagggcagtttactgccgaccacgcaatgactatgaccaagaggtataggttaaaatcaaagatgtactccgtgtagatattctcaaaagaacagaaataacaagaaaagagggaaagaagaataatatcatgttctgaagagagagagggtgagtgacgctgaacaagaagggcttgtaatctatgtaatctatatgtaaatgaatgtaccggtattactcttgtcacggggaaatgaccgatttacggcgcttcgctcgatttcattgattttatgtgccactcccgtcttcttaaaggccgattactctttcttttttaagtatgcagactatttgggcctacatatacattactcctccaatcaacttgtgtcaaggtggtactttggtatcggatctagaaggtcatcctttcattctctgcatactcgcacggccccagttttattttttttggatttaaaacatatcatatagtctgacatgggtgttattttcgagtatagatctgaccggcatctcgaataatcatcggcccgactggccacgagctcggtactaaaattgaaactaatgtacctcgcccgcacctgtgagtcgggaccggtctatacgcaggtactatcaatttctatggctacatagatggagataatcagacaagcttgagaagacagaacatggcactgccaaagacatcacattccttagcgtccccggagccagtccagatgcaggctaagtgggtactgttcgttaacggtggagtacatctcccggtccagtcaaagaggttttgtaggataaacgaacaaatgcattcatctcgcctcgaggtctcaatctcttatgctctggggtatttcagacaaacgatgggaatactcgggatacgatgtacccgtgaacaagttacaagaaaagaaaagcataatcagatatgtgttgatatcgaggtttatagtccatgttcttagcggggcggaatgatggtaaaccgagcaacgggtggatccccaaagataaggaacgttctacgggtcttcttttttgatttcttattttccccaaaaaaataataacggaattggtgttcctcacaactttatagcttgggtagggtctgtcatatatcgcatagttatattcaatgactggtgatcatataaaatataaaaccagcaatcaatatcatctcccagcggagtcaagactcaccgagaggctgagaaagagatccctatattacccgaaaacggtaccacccgtgtatggagacgatacacaagactgcctgtcacggaatttccccgatcttcgccccaaaacgaagtaaagtacctcaaaaggcaacttcgcaaatcaaagtccttcgttgacgtctgccgccttcgcgggggaacttgaggaggtcttccgtaccggctaatatccctgcgctttttcccttctctattcattagtttgccaccgggacactcaaggcggggttaaggtacaactccggccgcctcatacgaattcagagccgatcgcaggattctgtatcatatagatatcaaacatcctcgtgagcctggtcgcaagtggggacggggacccggatcgggatacggaaacaggcacgcgaggcctaaacgaacaatatgttcccaaataacgcattgggagtaatcagctccaatatgcatggagtagggactgtttttttttgggccccactacccaccctaagtcggggaatcatagataagaagtgctgataggaatgcaattagaatgtaattaaccatggtcatcctgatagaatgcagatcggtggaactttccaccttatctctctttgttagcataaagtacatgacctgaaggtcatacgtgttcctaatcatattgtcaaatccaatttagatcagggatgtgagtgcgggaatatcactgtctgtctcaggcacccggatcaacccggatatgtctgtcgcgggggaaagcactgggcaattattaccatcaaggcacaggtgggccgtggcgtcctgcacattcagccctcgacgccaaatctgactggtactttggtcatggtctttctcccctcccatagcagtgcggtgaggggttgtaaggtgttttttttttttttttttttttttttcccgtgcggttcttgcggttatgcgagaaaatctttagaaggtcgagacaattgactgattccatatgaagaagcgatttcctaggggcgaagagcgtggagacaggaacccgacactgcgcatatgtaacgaaagcaaacatggagtccgtttttgggtgagcggacttgacatggttgccatttgacagattggaccgattcgaccgagttgaacccgaagtgaagccgaattccaaagggaaaaccagggacaatggactatatatacgttgtactcagcagcccaagaatattgacgccatgccgtgtggttatccaccaaaccgtctcgataagacgtgacgctacctaaggggctaaacaatgtgctcactgagaccgcagccaacaaggagaatcctaggtatctccaacgaaaattcaacgtgcagagataagacccctggcacaattatgcattatcattggagctatcacctacaccgccatcatactgttactctgctatctccggatttcgaccccagagtcttacttcccatcggatctccgggagatcctccaatgcggatcccggggtgtcgagttgctatattgtaaatggacagtggacccttatctcctacatcgtccagggtcggctcttgtgtgagataaagtggaacatatctctgatgtgactgatcttcaagattcttgattacatctcgcacagatatgggaatgaccgaaccattggtgcgatctgggatatgaacactgacgctccgccatcaacggagcacgcaatcaaagatgacaacccgaattctctggtttatcttcccaatctcttcttccttctatcttcgtgcaagtgccctatcaaaattgattcgcgaacacattgatgtacaaatcaatgctggttatttgttatcagaacttctcgcagttctctatctgcctattatctatctgcctatctgtgtcaaggaatctgttatcacgaactcggatggcccctggtccagagtcaattgccatttatgtacgtatatccagcgacaatttatccttacaggcgcgatgcccttcacggggtatcaagcagttgattggcttctctcggcgaaccaatacccagaccgggcttttgtgcgagtttccgtttaagaacagaaaggattccggaccaatagagccccgagaacagtcaaggtcctggcatgttgttcacttctttgcatgtgagctattatgcatcactcactctcagctttgccacaaatattcgacgcaagcaagaataagatcccctatacggagtactccgtgctactattgtgtgacctacaattagctgtcgacaaaagcaagggtgcaccgtacatctacacttttataagcaagaaacaggaaattcatatatcatatctacagttatgcttttgcagtacatcgaggatagaccaatgaggactctggaaagacggccgagacatcccaggaaagatagatatgcaatggaggtattgtgcaatatgtacaaacgaagtatgcgtttccagcacaacttaggcacgcgccttgaagaaccagcgataagatcgtagcccatggacagaagaataggacaaggtgtcgaaatcaccccatcgtgattgcaacgaggtatagcaacccttgaattgttattctatctcggccgttgagctggtccatatctttcccgcatacaggtgtttcatctttccaatgagacagaggcgacagagatgaaaagggtatcatgtattgacgaaataacacataaattgaccatgagaataaaggggaatgaagaggagaaaaagtctatatcgataacccaaagaaaagctccaacatatgaggtgaaatgtcactccgatccagacaaccaccggtcagaaaaaaaaggcccccgcgtacaaatgggggagaatgccaccaaatgagatagagaaaagcacgcaaaaataaaccgagttcagagagagaccccgaagagatggagggaaaatgaaaacgtgggactatgccatgatagcaaaagaagagacaagaaaccatggaaaaaaaaaaagaaaaaaaaagccacccgaaaacccttgcgcccgctaatgaccagctgcgaagcagacccgccacggtatatgaggatgaggtgaaaatgtagaagatgaaatgccaattgggggtaaaaagtgtatgtcccacggggtattagaaatgaaacaggccgtctaggaatgtgatgtgtaacgtgaagaaactcggactcgaggaaatgcaaaagatgtaagcgtggcagaagaagaggtagaatatggcgaagaaaagaaagaaaggcttcatgggttcggtgactgtgacgggcctccggggtgtcccatgggagcagcattaggcgggtatgcatgttgcggaactgcgtcggcggagtacatgggatatggcaccacgcccattccagacatagcactcatatcctgccattgcggatagttcattcctggtgggtatgagactgatcctggcgtatgcatctcaggcgtgcctggcgagccttgcggggccatggcactcggcgcagacagggattgtgcaggtgtggtcattctccgtttcagctctggaggcatatgtgggtgaaattgattagggtatggtgaggccatctcctgtccaggatagctcatggttcgtggcggtggcggaggcacctgccaaactgttccgtctggctgcatagcgtatgccgtctggcccagaggctgcgcttggccccccattgaagatgctgcagatatcggcgaagggggtggtaggccggaggatatgctcccggggttccataagttgggtgacatattcatcatctgaccctttccggctgccattgtattcaacagctgcgggtccgctatcgtcgtaaattcatcccacgcgacccccgtatccattggttgatgcccagcgaagtctcctggtctcatgggccggtctagttcggatcagtcagtcaatgaacgcgcctggattgcagtccggggatgatattctggatgacataaacctacctggcgttagactcatgttgctttgaaccattccgacgttgtaggttgacatgtcctgcgcggacgaggtgttcattggcatagcctggtatgggtagaaagtctcggcgggatcggacatcaaattagtcggagaggaagcaatcggtgtagtgtttgagcgctcggttgagggtgtctccaatctcgagcttggtcgtgatttcttttcaaccggtggttgctggtccactgggaaaaactgacagtcctttcgcagtcgaatgcagttttcacatcgtccttctgtatcatctggcgccacaagacatcggatctttcgtcgtcggcagtgcactgtaaaagtataagtaacatggtcacatgcgaatatcccattctcaaaagcagggttgggtttattttctctggatcgacacacgttcgcgttgcgaagaatgacgacaagcataagggtggtggtttcttgggatttgttactgaccacatgcgacagaggtccgatgatatcctaacttattgcgcttcttatcatttgcgtccatggcgctctgtgagtttgctgttgatgccatatggtcgacagctgctggcatagctcccacgagcacggttctttcgttgtatcgatcgaatgcgcatcaaaacctcgggcgaagcgaaagttgtgcttggcgaagcagatggctgagagtacctcgaggcgtgatcagaggtgaatgcgacaaggacccgcgcaagaccatacagacactgccgagagaatttgaccgtggagtgcctccagaggatgacgctgcttcaattctcaggctctgatccacatacgccacactggacaaggtatgatattgcgcgcgtttcaggtcgaggatattgggggggtacgttagggcccgccgtgtgtctcaaagtatagaggtaatggtgcaatagaatggtcgaggatagattggatttctgggagccccaaatttcccaagtcgagtaattgcgaattaatcaatgataattatagtgattaaagtgttggaatgccgggggtttggacggggttagggccgagaagtttattgaggcccttgagatcgaggaggaaaccacactaggacaagttgaacaataataaccaaaaagatattagtaagaggggaaagggaaaaagaatagaaaaatagagtatccaaaggagcgaatatgaagtgaacggtgtgaagagaagaagagcagatcggagatggtaggtatagtccaacaggtagaagctaatcgcggggtgaaacgcccaaaggtcttgtatttttatttttttaatgattttttttttcttgggatttttgatttaatttaattttcacaagtatgtatatcagtacgtggaacaaggtggctctcataccaactaagactaacacggatgtatcgacttagcccaaatcaactgcaggtcattgtcaatggatgatcagttcaggggtccacggacaacttccattaatgctctagaattactccgtactacgaagtgtattgtagatttactggcgcttgaatggttgaatgggagagtatttcttgttttctgcaaggttttcctttttttgtccttgttcgtaatctcccttttgttacctatgtagttcctgttttcaaatcctgtcaccttcagattggtccttggttgattaggtaaacttgccaatccccctgattgcgtactatagaccccgttctccaaatgaagcagagacgaggaaccatggtctgggagccctgacaacagtggggatgtgtggatattggacggtggcctctcaaaatgtacaataccagttaggcttagggccaacaagaatacctgtcaatcattgatgaactggggaatacttccttcatgtcccgactaggtgattggtgacgcgagcttaggccggcactcagaaccaataggcttgttggtttgagggtccatcaaaaagaaccttctgtgtccggtcatttcggaggctgatcactagaaacctagagggcttctcgaaggggaagcagtacacttcgatccaagggataatgaccacatgggcttctggaaggctagaaattccgttatcccatctttctactccgtactccgtactccgtaacactatatgaactgaaacgaaccatcagttaatttgtgctaaaaacagattcagggtccacgagcgaaatgtatcaggttattggttattgttttaaatccagttttcttttttttctttttcttttgctttttttttttttcgtagttcgtttaatatacattaccgtttattttttctaaaacggaaaaggaaaataggtgattttttgggtatttgccccttttcagtagctttttatcctcatttggctgcctttagccaaaaaagaagaaaaccgtcaaaagatccatggaaatagtggaccaatcagtgaccacggaccttacttcatggaaccacaatgtaccttggatgaaaagtctctactccgtacctaattgtatatccaatgctaataggacagtctcactgtttcagtgttaaggatggcgtgtctggggacaatttctagagacacgtacgcggcccttttaagatttgattctactacaatcaaatataacattgtactttgaagaccaatagacataaatctgcatctacacagccctggactacacccaagtaggataaccgcccgaaagccttaaaagattactaccgatgatataatatatataatgtaatatacagcataggtaacataatgcgaattgcaagcgatctcacaaaccctgcgtggggcagtcaaggtttaattaaggatcgtcccaactttggtagcgtgttacaggttaggtcttggcattcgcatggggctcatctcgggggtttttccttctgtctcagcttccatggagaatcatggaagggcaaggttcttaatggagaaatcacggggaatcagtgcttattttactcggtatactccgtatggtataatgtacctgttcgaacagatgagacggggacaagaaaaaaaggggctattatcaactcccaccggttaaaccgaaggggaaatcgtgtcaaatccggcgtgggcttagggaacattattctcgtaagtggactcgagtgcccaggtggacagtgatcttcatacagtgttgtatggtgtatcacgtcaacaaaacccctcaaggccaataaacgccaccgattaccgtactctccctcgtgcccttcaggacatgtactaggagtgtctaatgtgtaatgttattgtacaatatatttatgctgcaacttcgaagtttttcgaggggatgcttccaccgcccttttgcgaaggaaaaactacatacaacattgtgctgcccacgctctggccccgcaattcagcacacattggtcgaagatcgacgagcacgggtctcaagaaatgcacttgagtcgatattattgggtttcccatagagaatcattggagttgaggtgtgtccgcaactaaactatcagcatatgtatcgtgacgcggcgaatgtaaatgcgatagatctcgcagtaggtgtgaggcaactccgcaaaccataaaaccaatgtatgttcgagtgaatgttgtatgttgtatacaatatacaacacattgcggaaaggtccgcaatcgggctcgcttggacaattaggaaaagccccaacgggcgtcgcgtcgttgtcgatcggtcaattgtttaacctgaaacaagggtccagtagtccagggctgagccagatctcggttgttaatcttagccaagaatacacttggtggatagatgtagaagaatctttgcgttcttagatgtcgcttaagcaggtatatactaggttacctaggtacatagttaatattgtagtttttattgttcaacatccaattcaagaaatgcccctaactattcctttctgggattagtgggaaaaccgctgccaaatcccaactgccgagctccgcagtggcgtgcaggtataccctataagctagttattaggcgtgctatgatgacagttcttaagggaatcgcatagccgacagcgaatttctttcactttggtctctcacgtagcatacatactttcggggttggtgatattttagaatgtctactgtctactccgtgagctctacatccctgaagcaggaactctacaaggtaacaaggcttaatttgcccaagagactatatatgcataagtatgcataaatatgcagatgacaagatgatatgatctaatatgtatgagaagatccatggatgaattttgcagatgtgatatgatcaaggcaatatagtacaattaggggtttgcctctaataatacacttcgcctacggagtacaccctacaatatatatagtaacctaactccgtagtacttcgtacttcgtacggagacggagtatcataaattgtaagagatcggagatcaccctgtgggccaacaatgcagagacctcactggtctctcaggttgggcccggctgtttcaccatcttcggggcccttgactcgattcggtcatcggctccctcaagggggagggtcaccctttttaacctgcaacctgccttacgcgtcctcccaagaaaaaacccattcctctctctattttgcccctatcaagattttgcggcctttttaaattttaaattttttaaattttttaattgatttcagctgaaggagaagaggaaggtggtattcactgtttgctatctggagttctccgatggcgcagagggcgtttccccccccgtctcgacaggcttggagttctctctacggcacccccggagagaaagcccgtgaagccaccaaaggcttttccggtcccaaaaaggggccaatgtccgtggtcttattactacattgtacaacatgatcatggagacaatgccccggtttgcgcgattatggcctctcgtgtttcgggctctattgagccggacagtccccgaactcggctcccagaagtagcagcatgcgcgaccaatttctattcatttgaaaaatgccacctcattcgcccacacgcaccacaaccattgcgtcaatggctctcgcttgcctgattgaacacgcgacacaacatgtcacacgagttcccccagaccgacttatgatcgcatggcatccaacagcagcacaccacgcccgagcaaacgtttccctgtctcggctgccccgcgcgtcgatgacaataatctccgggccttgagctgcttccgagccttgcgacgatgtcgattgcggtgccggggtagaggaaagggagtccaacgaaacatacttgtatcgataatagatgtgcagaggatggcctggtagacgtgtgcacttggacacgggtctcgtagactgctgggcttcacttttctcgcggtcggatgacttatgagacgcgacccccaacggtggacagcactcatgggcagagataaagcgcacattatatctgagggggaaacaaaccgtagtcgaaactctaccagtatctgcgtctccgatcgagaacgacatggatgcctcagcaggtgtaatgccgttccctttggggggcctgtaatcatcgacagacagagtcagcccttcgatgtgcacattgtttgtcgcacttggctctggattctcctttgggagtgtaaaggtctctgccgtgatatcccccatgcctagcggtgtcgattccatcgcaagcctagctccgtgcttgattcgaggcctgctcgagatctgcggaacctcttcaactgggacttcgagccatccacatttaaatatttcgcgtgtaatcacatcgcgcggcatcaggtcgctgctgatccaccccatgcatgtcttagctcccgttgaactagacaagacacgcccgacaacgcatgctttgctccaccaactccgtccgccataaacgaatcctccatagaggttggcaatcgagcccagttgatccagtgcatctgcgtcattctcaaggagtgtcgccatgagaaggtggctgattccttccccgggtatcacgaacccggagagccacgagcgcgagatccagcctaaagttttagactgtggatcgccagagctacgaagcttgacgcgtcggcgacaggggtttcgtgtgtacatatcatccttggccagtaacatctccttggatattttctcccgtccacacctgtcatcgacgattaagaccggcagaaccggattgttaggatctccaagtttgagctccatggaagccttcagtgcagccaattttggccatccaatattttctgcgaagacatacagaccctccagctgctgtcgaacatgcgaagagcccagttcacagtcccaagcagactgtagatccacgacagggggcgagttacgccgagtgatgctttcacgcagtgaaaaacgatggcttttctcgtgcgacttggtggctaagggttttgacgagccacctggagatggccctgattgtggcgccgggcaagtgatattgagactgttgaggaaccgacgtacaaccaccagatcccagtttagcttcccttctcgcaatttgtcgaattgtacaagctcgtgtaccgtgatatgaccaccgtgcggatcatacaacatgccaactcggacgaatgcatccaagcgaagaagcaattcggcagagaggagcagctggatcagcaaccacttccgctccatcccggacctgatcagaatatcccccggcgctttctcgttatctgaactggggtccagacagtctccatcgccatgcaaggaagcctcccataggacctggcctgcccgaaagcgccattcaggcagactgaaattgatccatgctcctggggtggccagcacgattgccaaagttttgatctgtgatttgacactttgtggatgaccctctatgatgtcggtaggtggagggcgagggtgaaggaattgtgtgtgtaagatttcgtgcaactcgcgcggactttcaatatccaggattgttttcgtcgatccatctgtgagcatttcatgtcggaacttgcgcagatgctctaaacgttgcacgagcgatcgaagatttatatctcttactccgatgcgcttccaggcatcggggccttcacagatgagtctatgtcgatcgtacacggcaccactttggcattgtgaatacggtttgctatatccctccattaaatcgaacgccacggttgccgccatggttgggacttgatgtaaatacggagggttccttggcttttcgggaccagtgtatcggatcgcgtcggccaccggtaattcaagaaagtgacggaaaccgacggtgccgggttctttgccattgttggacagcatgttgggtacttcgaagatgctaacatcaaacgttgccctgttgacagcgcctgttcggcgccagtcaaggacttgaatcggaacgccgcctttgacagcccagtcgtctgggagcggcaaatgagcgtgaagtgtgctcagagtaaaggatgcatggggcaatggcttgcgatcccacatgtgttggattaccgggttctgctcatcccacgggaagatcacctggggataccatcgacgatgcttgcctttctccagaaaaaagtgaggtgccccagacaacattgccttgatgtctttcgttgtgagtcttgactcctctgctgggctggggctgacaccgggtgagttgtcttttggtttggccgccatgtctagtctatattcaacaaagtcataaatatttccaggtggcgttggctcacagcgttctcgcgagtcgcgcctaggggagccacgggcatctttgctgtcatctcgtcgagcactactccctcgtcgtgatttgggcgtgctctcatcgattgaatttggcttttctttttcctttctcgccatgagctagctgttctaacgacaaaatagacattcttacttgtgttgcagttggagaaggtatgtccgaactgccgctgtgcgttcgaaataaacctcggaatcccccgttgttggtatggtcacattggcgagaatcgggtatacggcgatgcgatgatgatcgccttagtgtctcggactcattgtgagcagtaggagctgcatctgaggaacgacgccggccaaataagaaagacatcagaaccagtgatgcaattattgcatcttctaaatttggaaatacaatgtgctgacaaaacaaatattaaggaatggaaataagaaataagtagtatatgcagagtgctgatctcggcccctcggctcgtgtcgtgaccttggacccggaagcgcggcaagtgggtggaagtgataccgagtttttcccgtaaatgcacgtctgttgttgatatgaattaatccaaaatcaaattgtaaaaatgagagaaagcgggaggttaaggaggctacctatcataaggtaagttgatattcggaaagtgatgacgtcttgcggacaagagtggcgagcatcatatatattatccagcatccatcgtcctacctaggtatgtctttttaaagaataatacaaattgaaaacaaacaagcttgtttatgtacttcttcgtattaattccaacaaaggagaaacaaaatgaagagcccttctagaccagctatagagcttatccttagacatacaacaggaccctatatgtgcggaggaaggtagttttggtctacctgggaacacaggacagattatcattctctcattcaaaactagttctcatattaccgtccaacctccgcggtaagacatccagcgtcaattgcacccttttttgttctgtttacgagtgctcgtggaagaactcgagaacagtcttgtatccgcgctcgtactccttgcgcacctcggggttctccagatccgatcgtgcagccatccagccgtggatctgagtcgggaaagtctcgacgtacttaggaaccttcaagttggcctcaaagtccttgacgtctttgggagtctcgtctttcgaggcgaggaacaccatggggatgttcacgacctttgcatcattggggtcgaccatagccgggtggcactgtgcaaccgccttgaatagcttgttctcagcaccggaggcgagggtagcgatcttgccgccccagcagtagcctaggatcgaccaggactggaagttgccgccaggagctagcttgttgccttcagcgacgacattggggatcttggacagggtttgaggtggggcagccttggtcgagaagaagttgcccagcttttccttgtgctcctgggtggtggggggataccacgagatgtcggcggggctaccctcgaagaagtcggggatgaacacgcggtatttttggtcggtcgaggtggctaggatatcggcaccctggatggtctggtcaaagaagccgaagatgtctgcatattacgaaattgtatcagttaatggtcggattatatctcatgcggaagtgagtgactgaccatatatgactaggatagccttggtggccgactctgggccggtgacatctagaattaatcccattagctcaattcgtaagactttggcggtggtaagaacccacaggtcttcaggccattgatgatcttgtattctcccttggcctggtaacccttggatacaacaggggggattctgtgcacagtgatggtcagcgactcgtaattggggcatcacagaattcaaatcatctggggatcacgaacgagcagcaggctttgctgattccagacatggttctagagaagcaatggaagggaggtgtgttaaagtggagtttggttgcaagcaacggtctttggaaagtcagaaatggccggtattgcattgggaggaaccagataagaacatacaagctcgactgaaagcgaagttgaacaaagtatagccttggaagtagaaaaagaaagtcgaaaggcaaagaggaaaacattgaagttgtaccccgccgttcgacgtcatcggagcaacattcggcaattcaagatgcaacccggtgcaactaggaaatcccaggctatttatatattcttctattttattgtcggtttcgattatttcccaaccctgatccgtctggtctggtcagcttgcaatgcgaccgggtaatcgatctatgtgaatatatatggccgagccatagccgaggctcttaactatgtcatcttatataatacctaggtaatcaacaccaacggacaatcttggaagtagcacacatcatttaccattaaacctgggttacatgcactatttaggtgagatattcgaaaagctggggtactgatcctgtgtagcgaaagacccacaggacttgataatgttattttcctgcagtaaaccaaagagaagaagtatcacaacacaccatctggtcttgatgagaccaccttattgatagatacacccaagggtttcaccgcagagactgtcataccggacacctggctttatgagcttgacgacctcgggagagccagagagtgataaggacagtaaatccaaatcaattgagttttcatgataaatagagcaacacgacgcgagaggaagttgatgtctcttcttgattctgcactcaaggcaatacgatgcgagcagatccactgtcgaagtcttgccgcaagggaggatcttacagcggcagacgctcgtggggctgatgtcgagagataaaaaaagcaatatgaaataaataagaaaggaaaaatgaaaaaaaaaaaccaaatgccgagccaaaaagaagaggatccaggtgttctatcacctttgttgagtttgagacctacttagctagttatatatatcagcacatttatactatggagactattaatagtccacgttgtaaagatcgcaggcaaagtatgggctctgaaatcgaggagcctgcaataacacttgcaggaaaactcatggccgcagatctcccggttaagaaaaattgtcaaccttccaaacgccattcccgaggacgatcgtgaacgccaaccgtgaacttctccgaagccacgccggcaagagccgatgcaggcggcactaaggcgtccacgatcagccaggtggatccttgcgcgctgtcacatctggacttggaggagccgccttgcatgagaggagccactgatcggctgcgaaccgtagcatagtgtggtccggggattgcacctgcgaatcgagaaaaggctgtgccaggtcgatctaccgggaaccagcataggatggggccacagattgttgatgatcaaccgatcgtcgttgagatggaccttttcgggcagagcgatgtgcggctacagacgcggtggagtgatgagctcttgtcaaattgacgacttcatttcgggaagccaaggtctagtgaattgccagtctactgcatagaaggtatagaatgtacaatattggagaaatgctgtgtcattcacgagacatagccaaagggcagaggtatgcagtcctcaagaatgtgactcggctatgttgtacctctcgtttctaagacttgccccccttttctctttcttttttttccttttttttttttttttttcccttttcttcccggcttctctcccccttttctagttcctatttattattattattttattttactctatttatttattttggagagcactgcatgtctgctccgtttaaacgaacttgctaccaaatacgggcgtaatgcagaccggatcgtaatattaaattccatgcgcacagtggacatgtctaagctgtgccaaggaggttcagcgatccgagcatcgtatgcatagatggagcctctacggagtacgcagtaatcggggcatatctttaaaccatgttattattagttttgcggcagatcagctctgtcaagttttatatttatatagttatgtacggagtacagggtacggacatgctatgttctatggtgacagacatcgatcgacagggcatgcccccccttctcttctccctacataagcatctgccacgtccgtgcagaaggcaacgaaagagatgcctccattggatgattggataagacatctggaccgaagcgagaaacttcgtgtggagtcgagacccatttggcatttcgccacccaaggaagtaccttaggaacgagggaaacccgagggagtggatgctggaggcgattggctttcgggggagagaataacggggatccatggaatatattgtagcgtcgagagttgaccttttaaggtccgagccaaagtaaagtgaaaaaaacaaaagacaaaacgacaaaacgaattggagctaccatggccggtgaactccggggaccaatcaaatcgatcttntactttgactattgggggccaaaaaaaaaaaaaaaaaaaaaaaaaaaggaaggagcagatgaccatactccgcacaccagagacataggccatagtctctacgaagtactccatactccatacggactatacagtctacaatactccgtatggagtactccctatacagtctgatattgtactccgtatgttgtaaatgaaatgggaatatgctaaaaaggacagataaaataatgaaaaagaagactaactgaattggatgatttcaacgaatgaccagccggacagctcgcttgcctctgccttttcgatggtctcgtattctggccattccggtcttgtccgtgcgttgacatcttggtcttcttattggattatccgatgatagtaggaaagtatggatccatcttatatttcctttttccttcttttccctctttcctttttctgtaataaaattaaaaggaaattttgtctcaatagccgggtccattcctgctagcacagattctctccggagtgcactagcgccctttatttcacgcgatcagtatggacgcaagggattcccctcgaggaagaagggtctttccttctctctttttttccgtttgtttttcttttccctttttgttgtagctataacataggtactccatatacatactttgtgttattttgatagggttaatattagaaagtaagatatcttaaccgaacataggttttatatccaatctccatatcgaaacaaataaaacataaacccaacaattcggaacagccaaccgggagactatcatgtttttagctgtcaaccacgttctgcttacacccctcttgtttttcgctctttttcgctctttttcgctcttttttttaaatctttctattcggttctttaatatctgttttattataccattcccaaggcctggctagacccgcgtcgactccattccccgaaagagagaaaaaatcaatcttatttaccttttttttttttgctcgacttgtctgttcgctggaactcctaactctcttattataacacctcccccgcgcttgctatcgcctcctacgccacggtcctttgcccacccccccacatctcttctcttcacttcttagtgtctcaactttcaactcccaattctccccgagaccatgtactacacgcgctttcgtcgaccgtgacaaactcactctatccttttcgtggtgcttttttgtcctttcgagagtactctagtccttccagaaatttccctatttctcgggagaacctgagtccctcgactctcttcatataccgatcgcgagccccagcgatcgacgatcgcccctcctggattctaccagccctcccggggccgtacctggcgatcgagattgggcgttgagcggatcatctttcggccagctcactaacatcaacgatcccgagttctacgtgggagtgagggatccatccgcaaatctggcgaccctagcagtgccatcgggaatgggcccagcgttagacgcgctgtccgccccgccgttgaacattcgtcgtccagcggccccgacgttacccagctttgagctcccaccaccgccgttcaatttgggtgcagcacccgcacctgcagcacccaagtacggaaatcccacccatcccccaatctcccacgcgccagtgaacgtgagcgtggggaacctgctaacgccacccgccacgattcaaacaggggagcaagccacaccccagccattggctccatcaacgggcgcgtcctccgagctggcaccggcatattggtcaggggccaatccatacggacagtcctgggcatccggggtcaacccgtacccagcccgaaattccttctcaccatcatccggcatgcagcgctcatcggtaataccaccgccgacgacggatgggttgccgcacccgtatgaagccccgacattatcttatcaacctttacccgctccgtcaaccatgcctccctccgcttcccaacctgccatggccatgtatcctggaggacccgctacatccctcgcccccctgccatccaacgatccctatgcccccaaacaccagcatatgtatgccacttctcctcccttgcacagtccccaccaggccggcttctctcccatgtatggtggcggcgggcttggcatccaccctccagggcgaatgcctgctcacagtccgtcagccggacagccaccgttgggatatccccgccagccgtggccctcgtattctctcccggcgatgaacggtccggtcatgaccaatgtgcacagccccggtgggcccatgtcgatgatgggtggaatgcaatccgggcttctaccgggatttaacagtggacatgtcgccagttctcaacatctatatgggggccatcaatccccgcatggcatgcccgcccctgcggccgaccgtcctttcaaatgcgaccaatgtccccagagtttcaaccgcaatcacgacctcaagcgccataaacgtatccatttggccgttaagcctttcccttgctcgcactgtgacaagagcttctcacgcaaggatgctcttaaggtatgttatctgcggttctcgtgtaacaattgccgcattactgactcttgacaacagcgacatatccttgtgaaaggctgcggaaaggatggcgactcggacgcgaacagcaaccaaactggggccgatatcaagggcgaagggcggagcgaagacggcagcccccttctcaatggacgcgtttgaacgtgttccggtctttccgcctgtggcactttcgtccttgctgcgacgtaacttcccaacgttcaccctcatatttatttatgggtgaactttgaagacatgtatgtatctaccgaggcattgggagtcggggttcttaccggattttactttgattttacgttatttttttgagcttcggcgaagggtttgtgattgtttgggcatcatgggaaggtctgatctctgcttttatctctttttctaaccggatctatgtttactatacgtgcttatcggactcatgtgtgacgtgcgtacctatcctgtttctctgtgatttaaagcgattaagcgaactgttaatgggatgggcaaccccggtatataaacacccctgcatcaattatgatatggaagatatcccgaggaactccaatcgaagtacattaatcgtcttaatttatataattgaacagcttccaagccatgcttttttaacttgaatattattggctactcatctgctcattggcgcttgaaatgggagttcgtcagacctatggctgatttggctgaaccgccatctcagccacatacatgttgtctcattctaatttaacaacaggtgtgaatttaggtattaaggtggatctgcatatactgaaatggacgatatgggctcctagtttatgtttttggggaacaggatatagatccccattgtagtccgaaataggtatcattgtgttggcccaccacaaaaccaaggaaggattccccgtacaagtaaaggatcgccatctccctttgagcttggaaattatacttcgagtcaatctccgtgggatcccgccatatatccccccccccccccccannnnnnnnnnnnnnnnnnnnnnnnnnnnnnnnnnnnnnnnnnnnnnnnnnnnnnnnnnnnnnnnnnnnnnnnnnnnnnnnnnnnnnnnnnnnnnnnnnnntcaactgggctcgattgccaacctctatggaggattccccccccccccccccccccccttttgctatatatctgttgagtggccgaagcatggggtcagctcggctgcaccctggcaccttacacaaagtccagtatatcccacgtcgttcctccctatttcccctgttcagctcaccactgacgcatattgatagtggatagatcacattcttcttccgagatctatcattgagcattctctatatgtattcgaccatgcttccactactcttcctatgtgctccattagcacaacagaccctagcattacctagccaacataaggccagtgagaaacccttgccatatctcctccgtgctggcagggactatcgcagtgggagctaccagatccctagcgctgtccaaaatggaactagcaaggctcggtttgacatcccaacaccagaaaccacccttgacatagaaaccctcttcaggttagatgcacctcagatagattctatcaatggctccgtgtacgactggtggtattttgatgccgtctcggagaccaaccccgatgattccctagtcgtcacattcttctcctcatccgcggaagcatttccattcctcgacgcgaatgaaacctccgtgcttaacgtctggttatgggcttcgtttgccaatggcaccgtctttgccgattctgtcccggcgactgtggcgaccgtgactggcccagatgccgcgggcactaatagctctggcgagtggtcctccacaggctttagctgggctgctctcacagaaaatctatcacagtatgagattaccatcgcgtccgagaaactccaggtcgaagggaggttgaccttgacttcggtaagtggtgactcgggccctaggaacagacagcttactaacatcgctcaacagcgaggaccgtatcatctgccctgtggagttcaagtgggacggacgatacttgagattgcgcctcatattggatgggtcaatctcatacccgacgccgtgggtgaggtcgacatgaagatccatgggtcgacgctgaagttccgagggcctgggtaccatgacaaagtaagtgatttgaccgcctgcgggcacctggacatgaaccttgagaaacatcagctgaccaagtcatagaattggtctgatcagccttttatagactctgtccaaagctggtactggggccacggccgtctaggtccatactcaatcgtctggttcagttacctcgccattgatgacccatccaacgccacatatgtgagcagctacgttgccagagatggggagctgctcatctcagcctgtgacccctctattctcactgtgaggccggtcggtagtccggggactactggtgggcgatatccgccacgcatgagcgatataccggatggattccgattggaatatgatttgggagaggctaatggtcagttgaaagttaatgtctcggtgagaactttggttgctgggaatggaaacgattatctgcgatggacaggagacatagttggggaggtgatcgagtctgagagccagcgaacagaagaggccggtggtggtggtggcccaggaagagaaaattcacctcttgttggtgttgcggtcttggagcaattcgttatggtggaatagatgatgtcgaagacgagcattatcaatgaaagtcataatatgttcatacaatatactcgcatatagtatataggaaaacagcattttagtggcccgaataattgccagctcatgaaagaaagaaatgggagtatcaccaagatactcgagcgacgcgaaaagggaaatgggaagacaacataatacacaccaaacaggatgagattaaagaaaatgaatgacagtaccccaaagattactggctcgcttgcttagatttccactcttcgaccagaccccggtaatcctcaacgccatatggctggaagcatcgggccagcaagccgttcttgcgctgtggtgacagacctagctctcccagcatcaaatcaacatatgggatcgcgtcaaacacgaagtctgggtttcgccgcccgaatcctccagggtagcgatatttgccgaattcagtaaacagagctgtctcccaggcaagatcgatttctgaaacgtcttccgtcttgaggtcacatgcaccacgcacagcgagtgggcacctttcgcgtgtagctggggtcaaatcgcctttgaaataagctgagatccacagtgcctgggtctgagcaattagggtcgtgttgatggtcatggtgatacccatgaatgccagcgagcgttcattcaccagcgaaagtgggaccataaacttcgccaaccggaaggggtgtggcacagctgcttcggactgcgcgtttaacggggtgtatttggggttcggttttggttgatcacgcagtcgggggaaccgacgcaaaatctcttcatccgccgcttttaccaggttgtcgttcagcggatccgcgctccaagggaatcccaagtcgcggtcaatgccttccggcaggaacttgaggtttggagtgcagcgccagcctgtcgagcaaatcagtgctgaagatcgcagcgcatcacccgatgacagatgaacagtgtggtccgagagacggtcaagatcagcgacatgcacctttatggtgccatccttgatcagatcaaagaaatcggtcggatagttcagaatgctgagagaggaagcgatccagaatgggctcacccaaggcttcagcttcttcatctccgggtgcttgtcgtagccgttcaactgcacgacatcatcggccagaatagcccagaacgcgtccacgatcttacgacccagccaagtaccatgcagaaaactgcgaacgccagtatacccgtcggcttctccccagatacatggactgaaccaggtcagcaggcgtgtagtgaccagcttttccagccactttttcaagggcgtcacgtaaggaggcgccatccaattaggtccatgaccggactcgcggatgatccagtctactttcatacctgccgttgcgcagacataagccgcatcccaggccgacttggtcccgccaaaaacggttgcgcgctctccaggttgcagtactgcatcttgatactgcagcagatcgcggcagtggaaaagcggcgcgccaaaattctcctggccttggaatgtaggcaagtatgcctgtgatgtgatgccggtggccacaatcatcttcttggtatcgattgttgtcgtatccgctccgtgcaacacgctcaactgccatgttccgtccaaattgtgccgcgcgctttccacatggtgttccagtcgaatgcaatcggcaaagttgaagtgttgtacatatgcttccatgtatttttgaattacatgacctggaatatgttgtccaggtttgattccaaaagtcgcttcgtccattgggaagtcgctgtactcataggtgcccagcatattgttcgacttgaggcctttgtacaaacggtgtttagcccatactccgccaatagagctagcagcttccagcaagagcacattatggccgggattgacctcgcggtatgtcttgacagcggagagcccgctccaacctattggtaggtaatgcttagcgaaatggcttgcaacggtggagactcaaaagactcaacttacctgcgcctaccaccacaagatccacggattccattttcaaaagagtcccttgccttcgtcttcttcttttccttgggaggggtagaaaataaccgattgcgcgactagggactaatgcacgaatttatgtacaagcaaacaaacacaagcgaccagattactggaaccgaaggaatgataactaaaagtattagcgcaaagcacttgtttcttttgggggttttaattagcccttgctgtcgcaagccgggaggatggaatggtgggactattaaattagctcagctaggaaaaaccttgtactttgacagtccttcccgtaaactttagcatctggattttatagaaaagaacccgattggcatttaaaggaccagagacattaaggtggtgaccctctataatgggtattatggctaactacgcgacctgatcctagaccccttgacccgtctgggtaacagactacgacttggcaacgcacttattttgtactccgtactctgtacggagtacctaggtagactctttcggtgtcaccaggggctcttctggagaattcgaatcagcactgaatattttagctttgtcccgctgtttgaccattttagccctggtatcaaagcgtggccagaccgcggggatcgacagttcttcgattccgtaatcctttctttggcacaacatagtctatgttggacggagtataagggttccgaacagaaataccccactgttattttagaccaattttactgtgggaacagcgtgtcatttggatttatcaattcttttaaaagagaaaaacaaaaaaaagaaaaacaaaagtcgggactaacaatatgcaggttgccattcttcggttggtatctcaatccgactattgccgtccaattaaatagattgatctcatgcagaattattgtgggaatccaacattgtacaaagctcacatttgccgcggcatgagtcggatgggaaaaaatgaaaagatgaaaagatgaaccgttattcgtataaatgacccgcttttggatccaccaacgtcgttggcaacggggatttcccgctgtcattgatgtgaaacagcccttgtgaggggacgttgtatgcacgaggttaaagctaaagaaatgggagctgtcaaccagcctggacaccatggtcgaattcagtacttatgaaatcccctagaaaagacctatggacggtcttgatcaattaataataacactagtaggtgagcccctggccgcgaatttcttttctgttacctacatatcggagtaatttccggtttgatcaacaatcaaaccaaaaagagaatgtggatcagagaaatcgatacatacatactccatacctgcctctgcgacaacattgtatgacctgtcccgaatgactgactaattggccaaagtacgcaagctttacggagtatgcaactgcgctgctccgctactccggatgctggtctgtgtgtccgtttgcactctatatcacagggaaccctaaagagatccccgacattgcggttcattactggttctcaggattggcccagttgatattgtgcctgagtgttgtgcttttgtgtaaccgggaaaagaaaaagaaatcccaggttaaacaaaatgagttctatcaaggtactttgtacggagtactttgtacttgatcgaaaagtcgccttttactccgatcgttcccccaatgggaaatgtcatgtcgactcaggggaggtgtggaccttttgagtgtccgtttacacttccgggaaccagtaagctgggagtggaacaaacggcgctctcgaccttaaaacttctccccggcaagttgaaggacccataacccgctttccagcacccaaagatagcccatcgctatccaatgagagatgtggacgctgccattcttgcatgaggaatccggacctgtcagaaattctctatcgtgcgagcatctccataatagccatcgcttgcagtttagtttaatggccgccaccataagtatgtaggcccgccatcggacatttcatatcgatcttgtccttgcttttttttttttactgtcggtattgataagtcgactaaggagcgggcttggttctttatccgggctgattccaatagcaacgagcaagagggaaatcattgagatactgtctcctgccacttgtctcccccctcagcgccattgacttcctcttcctttatctgaatgtacaccctgggttgaatggtatttccctttcattttgatggcttatcgcacaaagatatcactacaactcggcaagtatggatgggtttaatacggaagcgttcactcttctgggagtagccattgtcgttattggcctacgaacgaccgcaagatggattatggttggcccaaaagggttccaagctgatgattatctaatgctggtggcgtgtgtgagttggattagaacttgtggtctctttgctttcgtgctaatcgatatggtgtgtaggtggtgtatggacttgaaaccggtgctgcgtacatggtcggcgcatggttcatgggccttgccaataacgcgatgacggacgaacagcgaaaaaacttgtcgcctgattcggaagaatatcgtctgcgtgtgggtggctccaaggtccaggtggccggctggtcattatacactctgttattgtggttgctgaaaacatgcatggccattttctactctcgattgacgtgagattcatatcgtacctactactattgggtccattgttactaaccgtatctcctactatctagtgcaggcttggtgaatatgcgagtccgaatccatgtggcctacgtcctgattgccataacttatatcgctacgatctgttcgatcctctttggatgtcatccaatggagaaaaattggcaaatacatccaaaccctgggagtacgtcatatcctatgaacagtttgtcaccttgagaccgtgcatctgactatttacaagattactgtcagcccgccgtgtcaaagattgatatctatgtaaccgtggtacttaatgtcgcgaccgacctctatctcattagtattccagcaccggtaagcctctctccaaacatttgtgtgtaatttcactaaccatacacctacctgtcaagatgcttgttaaagcccgactaaaatggcgggaaaagctcgaactcctgattctgttcagtggtggcctgtttgttatgatggccggtattctacgctgtgtgctcatcttaacagtaagttgtttgagagatatcgctgcggcaacaaaaactaatagttcattaggctggcgcaaatggggcgcaacaagctggaagctgggcctgccgcgagactttcgtggccgtcatcatcggtaatactcccatgatatacccgttggtaagacgcttcacaaggcgtgctggtctatacatttcatcaagaggtggctcacagagctatcctggctaccccggctaccctctatcagatgcagatgccgacactggcgggggcggcggcgggggcggcggcgggtattccaaacgcaggaagttccgccacccgctatcgattccagacactcaatggaatacaatcagcgacgagcaaatgatcttacctacctcacgacagcaaccgcccacatgcaccgctggcgacggcgactgggactcccgcagccagggtagtcaagggggaataaaggttgttcatgaaacgattattcacagcaccgagaagtctcagctgtagtacgaagattttcaatataaaaatcttgcagacacttttcacttccctcatttttgttgaccctgggtatttgagcgctggcatgtcttatcatttaatttatttctcttgtacatatttttatacccactctcggctcggcttcgttccctttttattttattatgaatctaagatccgtcacggagggctacatcctgtttcatccaagaaatgcataatccggcactctaatacccgaacctgtatccagatcaataggttgcgagacagtgatttgaatacattttaatccgtggacattgttacacaaaatttagtttcaactgagcggatgcaaatttccattgacttgctgtagcagatttgtcaagcctcgcatcaagggggtgggaattccggaccgactgaagcaagtatgcaaggaggatttactgagggtgaagcaaaagggagaaataaccatggatgttgactaaccgggaagaaggaaactaggtctatagcgaattaataggaggccttggcagccaggtggtcatgcaagtgatgagataggctgctatgtacacatatgcaggcggatgggtacatagactcggcggtccccataatttgtacttccttcactgcaagtattaagtgtttcaagggtatggagtagttgtggtttgtttgtctctctggtgtctcttctccttcattccctgtctccttccataacgggacatagtctatctccgatctgcaattttaaactccggaaatttggtttcaccacgcacatagtgtcacctgcgaaggggctggtggaacgatgtgagccgaattcaatacgccggaaatgcgagtgtgcaaccgaacctgcattgagagattctaatgttcctgtcatgcatagtggcgatagggaaactacaattattaaaaacaagtgacataagatataaatactccatttcataggttgctactatgtggttttgcaaagagttgcatgccatcacatcgcacgtttgccgtggaagataatataggattaagctttacccgaagagagcttgccctcccttgaatccgaccacagacatggtttccgacgagggggcattgatatcggattactgacctttgttggacatcaagtaggaaaatttgaaagatcttccgcacccagagatcagcttagatgcaacgtgagatgaacgatcgcccggatctagccacaatgggtatagcataggtgggttgcatgaataagcggcgcctcatgcacacctgcacactatgcgtttatcaccaagcagacagtgcatgctactctggaagctaagtagaaggaggtagaaggaggaatatgccgtggaccatatccatgaggggagctgcgctgccacgtgacgatagaccggcacttgagcgtatgatgtcatgagctttcatccatggatatccttccaaggttcgaaatcttccgttgataagctcctggcaaggccatgggacaattagtcccgaaaatatcagatctttgctgcaacaactcttcgcatcaagcgtttagcccgatttttggaattatagggggaaaggtcggggtttaacctgcccattcacatcaacaggatggatgacgtgtggatctcccacggttgtagctgttcagtgggaaaatatgggtagtgacgtattagaggggagtaacctataaatctgaccgtattagcatctgaatccctcccaatacattccaaatttcgcaagcccaaaccgtattgtgcatcaaaatttcccacaatgactatcaaattcaccgtatacaaaggctccaaggatggaatcaaacaggcggagaccgagagggaggacctcaaacgggatgacgtcctagtacgaatcacgcattcaggagtgtgcggcacggacatccactacaagtcagctgagatggcccttgggcatgagggaacgggcgtggtagaagcaactggtccagacgtgaagattacgaagaaaggcgatcgtgtgggttggggttatgagcatgactgctgtggcttttgcaagcaatgcctcacgggctgggagacattgtgcagtgagcgcaaaatgtacggcttgaacaatctcgatcaggggtctttcggtacccatgccgtgtggcgcgaagcctttttgttcaaaattccggacaacatgagcaacgaggatgcgggaccattgatgtgtggcggatcaactgtgttcaacgccctgcatgttgcggaggtccgtccgacctctcgtgttggtatcgtcggagtaggaggtctgggacatctggccatccagttcgccgcaaagatgggatgtcaggtcgtggtcttctccggcacagatagcaagaaggaggaggcgatgaagctcggagccggcgagttctatgcgaccaagggtgcgaaggagttgaagatcaaagctcccatcgacaatctcattgtgacgaccagcagtcagccagattggtcaatctacctgagtatcatggctcccagtggcgtcatctcgcctctgtctgtcgattcgaacgatctcaaaatcccgtatatgccgctgctcgcgaatggtcttcggattcaaggaggcatcgtgggttcgagacaggtccacaaggatatgcttgaatttgcctcataccacagcatcaagcctgtcaagatgaccttcccattgacgttggatggtgtcaaacaaagcttgacgactctggaagaaggaaagatgcgttaccgtggcgttttggtggcaccctagggcatctatatgcgggaaaaaggcgcattgggtgtttctgatccaagtgagaaatttgggaagccaaggctgtatataaaaacccaagtcaaaatgtatgcaaatctgcacatgtgaagtcgttcgttcttgttcgtacatacttaccatatgtgtgggaagaagtagaaaggcggcgaaagagtaaggcttttttggaaacagcgtagagatcaccgagaagagtaggactactgggaggaaagaaaaggaagggagatggagtaagggagatcacacagagggagacccagaaaattctgtgacttattgatgcctcagacaccaatagtggactgatgcgtttttatagaggcattggaaatggaaactgggaatgggagagaggcggtttatattcatcaactgaaaggcgaggaccttgatagagggtgggtggattgagccatccaagtcaaccacttggtgaccaacacgacgtcacaacttttagtgcgaattttcacaaaaatactatcttaggccaaacccatcccgccgaggccaatttttacacgcaacttacagcagaaccaactcaaaggcgcccttgaattggtttatcctccccatcccgaacatccggaaggggtaggtgaggctcaggcaaccccaagtcgcgtgcagcctcccgggccgcccaaagacctgtcacgaacgcgagagcaaggcctccggcgtatccgagattactgaaaccgccagcatcgacgcccgcgacgagcaaacctggaattttggatttatcgggtgtcaaagcgtgtcctttcgcgtcaatcgcgatgccgccgtaggtgaatgtgatcctagtgaacgttagatgggaggaattggaaggtgcaagagataacctacgacggctggacctccatggcatagaagggaccttccccatcgaccaagggtgtagggggcgaaccagcacgaccgataggtgcgtcaagggaaatgctcttatcccctaaacgtaccactcgatcatactcctcgatagtccgtcttgcctgtgcattgttcacaccccattcttgaaggatatcgatcagaccgctcaaagttgacgcacttccaacattacagccatgctcgcgggctttctgcagacgatcgatgtcccctgcattagggaacaacgcagtgacgcagtgttggagacgtgtttcctcgctagaataagaaaacaggtcaggatattacctcaatccctatctatggggactaacatacttgaacaatataaacccgcggcgcttttcctgtttggcgagatattgattgatgatctcgtcacctgtggtctcatcggcaaatcgccgacctgcttcgttcagtagtaggcagtgcttactttctgttgacaaattagccagaaccgctgtctggacaaggagttgctcttacggtattgtgcgagtggaagatagtcctttggatccacgtcttcagcccgaagtggagctgcaagaagatggccatagtaggtgctcattcctctactggttcccgcgccggactcaatcgccaatttgagtccatcgcccaccgatccacgattggagcgcacaaagatgttgtctccgccttgtcccaagtatttggatgtcatcgctggagagccttggaagcccccagtagccaataccactattttggcccggacttcgtaatatgcagctggcgagttggaaaaattcctgcaaatgactgcgccaattatcctcgatcctgaaaccccgggctcgctctggatcaacttgaccaccgacgtgttggtgaagatatcggaacgtgtctcgctagactcaatgcgctttcgatggaggttatgaaggtgtgggatcttgattgggaacccaatgcctattatatgtcagtgtaactgttcactatattccttttgtagtcctaccgattgtcatgataccgtcgaatcgggttgccgttggcacgccattttcgcgcatccactggacagcgggcaggtaatcgtttaaccaggccttctgcaatgttggatccccttccgggacccaatttctcagccttttgtaggtttgcggggcccagctgtccattgatggtattagcaagctcgcttgtcctgaagattgactcaattgcttacaacattcctgcagaataatttgacgagccaccaacctccacttgcttctcgacgacaagtactttggctcctgcttgtgctgcgaaagcagcacatgccattccagacatgcctcccccgcagacgagtacatcgacttgaatattctccattgtgggtagggttgacatcaggccagagacgcaaggagggtaaatgattatctcttcgaagacttattagagcaagcaattcatatttaacataatgactataccgtcgaatgttgatactccggggcctatagatgcctcggcaccggcgactaaattaagtagccggtggacccacgcagcgatgcggccatacaaatatttgcaggtgacggctgagtgtaatcccatgtgccatcctcccgtgtgagtgaccgggggagtttctattagcactgtttactccctcgcactgcggtagtgtttggaggcaaacatctttctcgtaagaaatggaacaggaggaagcgaaaggaaaaagaaagagagtagagaaggggtgaaattcatagaatttcttgtagagtggatttatgatctggttactaaatatatcgatggttttcagacgctactcgctgggtatacgggacatcgttattttacataacattcaatatgtattcttatagcctcccgttattatgccgaccaagcccacagtggaaggatatttctcgccatgaagccattcctcttttagcccagtcgtcggggactctatagacaagtcgaagttaggacactaggtgattcacattgaagatcgcacttacgagcgaagattcccgccagcgacaacgccaagtggaagactccttgccaatgaaacgactgtgccagccggtggatattgccaatgcagcgtggtatttgggaccggaacagagtagtttcgtaaccggaacgaccttggaggtggatggaggtcgaggcgtgtagagctgtaaatctcatagccgaaaactcccccgcagtttttgaaattccggggatgtgatttctccactctctcgctccttaaatcaatcagatatttcccttaattaccttaattaccttcattacctatattacctatattacctatattattactatttactcgattcttagagcccccatgtcatcatattctggggatgataatccggctggccaaactcgccccgccagctcggccgcgtgtgaggcatgtcggaaaatgaaggtagaacctccaatccttaactccaagttaatcttggaaggttcgtacctgctgacaaagtcttctagatgagatgcatccgcccacaaagggggcagcagggcggcaaattgacagaaccatgccaacgatgtaagcgtaccaaccgcgagtgcaatatcccagagccgagaaagcttgggagaaagcgtggggctacaggtcgctatcaaggatttgaaaaggcctatcggaaaatgcagtcggaattgaaaaaagtgaaaacgtctcgtgtgagcgagaacgatgaaatgcatagctttgtcgcaagtgaagaaccgtctctagagcttttatccccgaaccacccagctgagacaattaacgcccaaacgtcaccagggttagggactgaaggctcttaccgtttatgcctcgattcaaatatgccaaccgtacaaggtgatgagacgttggaaaacattgcctctcctgcattccgcagtggcgaactctctcagtccacccatgaaccaatcagtaatcctctggcattgctggcagacgcatccgatgccgcccaggctttggagctgcacccaatatccgccaacctttcaccggaaacaaataacgcatcttccgtgaaccagtcgtcggccggtcagtcaactggagcaagcctgggtcgtcaactgctacatcggccaggttacgtgtcactgggcctacaactgggcagagatactctcgaagcaggaatagataccctggtcggcccctatgaacacccataccgttactcgaactatttcaaatcgaccccacagattcctccccgggatgttggccccgatgttgacccagtggaccttggtttggtgaccatggatgaggcctgttatttgtttccagtgtaagccaaaatactgtgctgtcgacctacattcactgattggatttagatattttacacgtttgcacccagtcaacggaatcctagacccgatgctccacactccggatttcgtgcgttcacgatcggctcttttgttcacctggatactggctttaacggcacaattcgatcatggatcggcatcagtcgccaaacgattacgtctccatggcgaaaagctctcgaagcatgttcataccagtggatataagtcggttgaaatcgttcaaggctactatatctcattactatcagccacccccgcagagtcactagcacaggagcggtcttggctctacacaatgtatgccttcggtgtagcagctgaactaggtctggaccaagattcccgcgccaaagacgcagcccctctgaactcgatcaatgcttcatatgcccgaacacaggatgcagcccaaacaccactcccgggaaatggctcgtcatctttattacaggagtaccctttaaaagaccccaccgaaaatcaacgcatggcgcgaaatcgcgagagaacgtggctaaggattctgctatgggaacgggcgaacagtgcagcctgtggtaggatacacactttcccggaaacggatttgacacaaagcatcgacagctggtggctccaccacctggcggacccaacagataagcacacatgtgcgtttatcactctgcggcgcattctagcatcgctacaaaacgaactaagacagcaagctcatctggcacatgcggatccccattgggtacgagaaatggttgatacgactctgagaccctggtgtgacctttggctatcacatacaatgtccaattttttaattacatccccgtctgaaacgctgtcaaatattttcctccattatgtttatctccacggaaggctttggacgttgtcattcgctcttcatagttccataaacgggggtcaaaatatggatgcaatccgagccgattgcttcgaggccgcagttaattcttgcgagctagccgtgcgcgatctgcacaatatcggggagccattatattgcatgttagctccgacttgggctatgatatcctatgctggcgttttggccttgaagttatttccagccttgtacggatcccgtggcggaaatgatgtggaacttttggctctgctcagccaagttgccattcaattagagcgtgcaggcacaacgccatcgcatcgatttgggatcgctgcgttgcttgggcaacacctgatgatgatcttgagagccagagcagcgggactgaaagactcaaatcaacctggacaagcaagaaaagatgtgctctacaccagcacgggacctgatgaaagagcgagacagtttatgccacagcagtccccccattcaaaaccatacgatgctctcatttcagatcatgatccgttcttgactacagcttcaatgtctacacagggagatctaactggcgagggatttgctgacttcttccgggaaatgttcgggcctggatttgggagtgtcttttgacaaatttagtcaaagggaactcaagaaacacagctattgttcaggctattttagtgtttaataacgaccatgaatctattgccttcatacagatacagtctgtattgtccaaccatattgaaactagacagaaaataaacgccggtcaaagctaagaagagaaaacatataatactttccaacattcctatcatctcggcgaatatactgtatgggctacagtatcaacctgcaagttacttctgcaaacctccccgcgaagcaccttatttacaaactttggatcttctcggagaggtcgacacaaaccacacatgtcgatgtctctgcgttctacagcttccgacatacgatggctaccccgccaaccaccagtagttccaataacagcccgagactagcggtttccccatcagatgttgggacgtctctggtgagtgacaatgtggcgagcccatacggccgggagtatgctactggggacaactctttctatccaaatgcaggaaccccagtgggtatttatcgtatcctaagcacaaaagggactatcacggtcccggaaaacacgctttgggcctacaacccggagacagcggacagatatagcgaggaggctggttggaaagccccaatggtacgcattgcgcttccagtggcccaggggattccgtttcaacaacaagcagaacatttagctagagtggtttgatttagacgatcctctttgctcggcggaggatggactagcagcagtgtccgtatgtgaggctatcgttacagctctgaaggccaaggacttacacccagtttcagttctagatgtttcacgtgtctagctgcgaagataggatctggggtaactggtcggtttatgcgcgagcttgagatacgttcagttgcacattcggcacatttggcacaagttcctatgcatttgcatatttcttctatcaatacgaatacttgcaaaattttttattggttttctaatagcatgatgcactttgatgcagacgaccaacctcactcggtgtattaaagaacgcaccggtttgtggaggtggcgtgaagtggcgtcaactagtggaggcaagccacatgggtaaatgctaccggggtagtatttacccgggtccagggtaattcgatcatcctttagttatatcaatagacgcgactaatgacgaaaacgaatcaaccaccatatctggaatcatgacggtctcctggcccccatctaaggtcaactcattcggtatcgccacgttgtctctcggcaactggagagagcatcgtttggagccacgcctggaagctgcggcgaaatcgggatatcaatggatcgacctgttcgacgagtgttgggccgcgtatctggaagagcatggactaccgggagaccaactttgggaaccgacttcagaaaatctgcaggttgctcgaaaattggctggttttgtcaagtccttgggaatgcggattgcttgcacccagcctcttcggtcaatagagggagttaaagacccagctgaacgccaggctgtctttgagttggtcgctaagtgagatataccttacctcagtaacccgatcatgaagtcgatgttaaattggtatcacagacgattcccattcatgcgcgcctttgacaccgatcttgttttcatgtgtgcgagtatacgcacggacaagggggttacttctgatctaaagacggtcgcgcgagatctcgcggaactgggcgacatggcggcggcatacgcaaatgccgatggcgggcgtatgttaaaaattggatacgagggcctatcttgggcaactcgaaatacatggtcaacctcatgggaagctgtgcgatttgccaatcgtcctaacgttgggttgatcgtggatgccttcaatatcctcgccgtcgaatttgctgatccgtacaatgttgctggccacgggcgggtctacccgaccttggaggagtctctggatgtccttactggatcacttgcatcattggtctcgacggtaccaggtgatcggatattcttcttccagtgcggcgatgcggagctgatgaatccaacgactttcctccccccaactgacccggaaacaccagcactcctcccatggtcgcgaagtcatcggctatatccccttgaacagtccagaggtgcatatatgccggttgaggttgtcgcggctgctgtgcttgctaccgggtaccgaggcccaatttcgcttgaggtgtttaatacatcactgaaccaaccaggacaaagtgttcctgcagagcatgcttccaggggaataaatggccttcgcctcttgtgcgaaacagcatggtaccttccagcgttttggcaaagttattgtgaacgcaagaatgctatcgcacaagtggtacaacgactacagccagatgagcacaaacataagctatgaacgagaatatatagctcgaccagtccgaaatctgaaagtcatcaactgtatttactgagaataacagtctctttccgcttccctactgatattagtctaatgtctaatatatccactagtcgagtgtgaagcagcactcgtctttttctattcaatctttcatttttaatgtttgactagagtaaaccgtaacacgagttggaatatctgttcgtatcttagatctttgcagcctccttgctgcaaatccctccgttaacaacgataaaatccttccctttcctccatccagcccaatcttgcagcacactctcgcctccttgcccgttcggcaacgttctcacttcccagccatcagctcccggtgtaactgatggtgtctcgctaagtgtgacagcagggcattgctcataattactagcctcaagctcatgatgctccaaaaccggtgtacagcaggcgtcagttccatcgttctgcgacttgaagagcgcccgagtagcgttcaaatgtccaaggtgaattcccgactttgatggtttagtgcagatatgaagtcagggcaatactgcccattgaatatctcgtcttctatgtatcttgaagattcgaaggatttcgcaactttctctcctgaactggagctcggtgtctcccgtccgcggggtccccacacgggctcatctggagtccatttgggagtttgggagcttttcccttgtagtcaaaaggcatcatgagcggttatatcatttcaaatatgataattatcactagaacttctaattcttagttgaacccagaaagcaaataaaaaaagaaaggcagagagggagaagggggagcttgaggtcggcgatctccgccccgggtccgatcacctcatattaatcagcttgatgttgagacaaaacatcaccccgccatttccaaaccctcaacttctctttcgtatcttttctctcatatcttttctctctaatatccgcctttacccccaatatgactacactcaagcccggcgactcgttccctagcgacgttgtttttaagtgggtaaaccctcaaccccgcaaagaatgacgctaatccctccaggtacattccatggagcgaggaaagtgatgaaattacctcctgcggcatcccaatcaattacaatgcctcgcaggagtgggccaacaagaaggtcgtcttgttctcagttcccggtgagctagatgttgatgctgtatccctcttcctgacggaatgctaacgtacgtgtgaaacaaggtgccttcaccccaacctgttcggtcaaccatgtgccaggatatatccagaacctgcccaagctccgtgagaagggcgttgacattgttgcggtcgttgctttcaacgatccgttcgtgatgagtgcctggggcaaggcgaacgcagttcgcggggatgacatcgtgagcttaaccccactttgcacatttttgggaccggtattgattttggtggatagcttttcctctcggatcccgatgccaagttttccaagagcattggctgggctgatgaggcgtcgggccgcacaggccggtatgcgatcgttatcgatcacggtaaggtcggctatgcccagatcgagactgaaaagggtgttgtcaaggtatgcattttattcttcttttccggtccttttgactaacagctcaattcgtctacagaaatctggcgccgacgccattcttgcttccctttaaatacacaaattatagaataccctctgatcactgcaagttcaattgcaaatgttatttggaaccatccatggacgtttctatgtgagaatgcgggttctgcggaaaacacagaatatattaccttcgattactgtgtacggtctgaatcaatacagttcgttaagaataatccagaacttcggcttgatgcctatccagaacttggactgagaatgaagagggggaggactgctcaatcatctaaacagttaaaatttcaagtctcgcgtcaatataacctagaatcaaacgcaagtctatataatgcaaatcttctggtggtatctatcatcaaatcaaacgctggagaatgcaagcccgaaggttgctgatggatggggacagggaatcaagtatgcgacagagcacggtcgtggaggtgcaactccaacccagcactgacacagtctatatgcaaaggctcagcagcttggtatactttgtccttgatcacagcttcaagtacttccggtccagagttggccacctgatcatcgtcatccgacgagacattttggaaggcaccctcaatatcaacacgcctgagtcgagggaaacgagtccggcgattcttgattaccgtctgtaattgggaaaccaacatgcccagatatcgctcctcacatccttcgatgtaaagggtctcaagcgacgatgggagacattccatgagcggcgtggttggttcgttctggtagcgaatgtccaaaagatttggcagtctcacacgcacttctttcaaggcagtgaaatcaacaagggagccaaaccactcatcatgggattgattcaacccagcagcggtgaaagggtagtggctgccatagtggtccagccacagtgtttgcagactctttttgctgtgggtcagagagcgatagaaggcggatggttggtagccatgtgaaaggacgtgcgagtccgagtgctggtatttgaatgacctcagatctgcgcatgaactaaccaacgtctccatgccatgatttccgctacttgcgcgcaaatcaatgtcggtgattgaggagaagccaaggcgtggcgtctcatcatccgtcgatccctcggagcgtggagtgatggaactagggtccactactgagttggctgtgattgtacgaacggatggaagtcggaaaaatggcaggagcagtgttgatgacagttgagtttcgcctcccgcattgtcaacgcgctcgttatgatccagatcctcccgatgatgcaaagagacctcgcgtaggtggcggaagggctggacggaaaacggcttttcgcagtccacagccctttgcatgatgcgatccagataaggagaatttgtcatataggccagcgaaatattcctgagctgacttaataatgggagaatgagcgcaacccaggcgtcggaaaggccttgtccaagatattgggcccactgatcactttcgagcgttgagaatgatacagcatctagccatatcctcaaagctgtcgagctctggatttggttgcagtcgtcgtctgatacgctttttgcatgccagtctgttaggtctagctcccgggcggcccgcgccagcgcaggtcgtttcagtatggcatgcaggaacgaattggcatcttgccagtggttgatagacacatttcgatataccagcgggagaaaaagatcgtgaaagtgacgggaaacaaagataagattccagcggtctgctttctgttccagctgctctccaatcaagagaagtacgtcattgggcagtgccagctgcatgatagcacattcgaacttcgaattaagccggacaatgagaggaacacatgaaaatcgcggggaaggaagaaccacaaaaatcaattgcggatcaaagcaatgaactaggagttaggagtactccatatttaagatcaaatttcaattatcgtgaaattggccactggaggatcaaactttgattcggaccggccaatgccatatgcccagcccggtggatctatatccggacactctaagaggccgtaaattgttcgttcccacttttaagggaaaagaaaattctgacgtcttaatcccgagattgtgtctgtatgggaggtttgccgatttctcggattataattccgactcattcgtcaaccgaatatcgcagatatgaagaaaatgatgaaatgattcatatcgagtcctctacagtatctcccgaatttcgcacgaataggtgtggagtggttaggtctgaggggcagagattgacagtcgaagggccacttaggtgcatggatgtgcagtcattgcgacgatactccgtgttaaagatggtgtccgagtcatgcagtcgcggggttatagggcatagacgatcccatccacgtcgctccaacccgatagaagtcatcggaggacagcaaaacacgatggcatgaaatgtatattgagcagcataactatggaaaaccccacgatgacagaggtggatcaaaccgagtgtgggctcgcggagggtgatagtggagagagttggaggttaactgagacattgggcattggacttggacacacctacaagtgagacgagtacggagtacacatcgtgaaaacactggagtgggccatgttagcgacaaagctcatatgcaaattattagcccgaaatgcccagtgtccctcgatagcttgattaacggattgtcatctttcggggatttcaacgttaatatccgctcccgcagatgccgccaggttcatcaatgcccatccgacctagacacgtggctcccaatgccaatgctgtaccataagtccatgcatgatttctagtgcacatgttgctccctcgcacgccatggtcaaactcgcgctagcacacaagcaggttgaccccaatcccttttcagcggcaaaagtacgccacgcttggtcgctacaccccaaaggaatcgcttgacggagaagacatccaaccggtgatgttgtaagggcgatcagaaatccatcgagcaaactcagcacggcgatgcgtctatctctccaatatggaatatagccattgcgtcaatacaatggacttggagagatacgtgcggtcgtgtagtcgagacaacctctggaattatatgcaatttagaagcccagaatacaatagagctggatccgcggttgatctaactggtggcagcacttgcagcagcggcagtagcagctgtgccttgcacgtccatgaaccacacttggagagcagaagtcaccacaacaatctcccaatcttctcccatagcaccagtcaaacctccgcccatgaaggcgaatcgaaaccctttggtcatgctccaagaagcgttatgcgcgatgagagccacaatctccaacccatcgctcgtataaccccgatcgcgctccttcctgctcccgcctacgctattcaccggtcctgtcaaccgcaccagtttccatccataggaatggccggcgagttctttgatttcgttaccatggctcttacgccactcgaatctctcgggtgttgttccctttgctcccacggctatttcgaacgcgtagctaggtgaaatatgcttcagcgacccgcccggaacgaactgtgccacgatggcatctgcacgttgagctcctggacgaggtgggagggtaattgcgatgggcctggtccttccccacttgtcactctgggccgttgccattactgggtgcttattagttgggccatcgtgtagcacgaccgtgggtttgttattgaaaacagtcgcgggggttgacaccgcgtacagcttttcttccgcggtcggcccaaggtgaaatgtggttgtgagtttccattgaaagtatccgttcatggcgggcgggaatttggtggttgcagatgtactgcgagattcattataggatggtatgtcatgttggggggcttgagccgcagtctgcggatcatgctctgtataaggtggtggtaaaacattgagcggatgggtgtttgaaatagaagacggtaaatcagttaaatcgggcgcggcgcccattatgtgacactcgcggagagaacaaagggggaaaggaaggaaatgagaattcgcgggatgcaggccccccacattttgacccccaacgccacaggcgccagacttcccgatgttgttcccaagggatgcgacctgaccggtcattccaaagatgatcccttgcatatggccatctctgcttgttgggtgatttcgattttattattagagacttcaacgtcgcgcacttgtgaggggaaagagaccatgcagcaaacctgacctcgtgtccgttaggaacaacattttttttttgccaatgtataagaagcattcgtagtcaatatatgggctcactgaagccttccaagtgcacctgatatagtatttacctggaagcattgacgcagaaacgtgcacatgtattttgcggggtcaacgcaaccctagtggcgccacagtgtaggaattatattggaacaacaataccagtcattagatgttgtgtctgacgccaggcgggtgactcactattccttgagatctgcacttgaaatatccgaccatagtaagccaaggttacatcaaacgcttacgaggatctgctagaatgattggttttatgaatggtgtactcagtcaccagagatgttatcaccaacatatgagtatccacaggccgtgaaacccggaaataggactcgatccatggtaggctgtggtggaaagggggctgaaaaggtgacctctctctctcgataaacgactgtcgaccggatcttccaggacaaaagaagcattagtaaagggagctagagtgccacgggcgtagtggcgtcggctatctgctaggattcgggcacgggcccaaatcaagctagtaatttgagaggaggattcacggttggttgaacacattttcttggtctgactgttcaatctgaactgcatgaattctcagccccggggtaacggcaaaatatgcagatatggtgtatcacattttagtacccggctagagagcgacctgggatcagtcggaagcggcagagggcaggaaacgacagtagagagtatgcacacggctcgcgacatggttttggacagggatgctggggcgtcccagggtactattcatctagtaaagggggaagaagggggaaagtgatgcatcgttcccgattgtagctcctcgagacggccccccgtgtcattgacagccgtcgtaggatgaagaaaccgggccctaaactgccgaatcttggtggtcagcaattgacgtgagcaagcagccctttgttccgggctttcaccccgagagcggaagtctcgtgtggcatgtttgaacctggtaactgtagccttgatggcccacttggcgccttaatttacggcttcgcaggctgagcactcaatcctccagccgcagccgcaatgtggcgctttacaggtgtgccaagatataaggtatgtggcctgttgggattttgggatagaggttcaacttagcagagagcctctgtgagggggtggtacaacagtcatcagcatggaatttgcttccagagtgtcgcgcaaatcatggtttttagtcgggtcgtaccacagacacgagcgtttgttcatcggacaaacaggccccgagggcgttgcctcttagatgtgccgtgtcaccgaatcatagcgggagaggcgtgttgccaaggataactaacggctagccgtctggaaatggcgccctaagtgaagcctctcgtaaaccaagatcacaattctgacatcgacgcagagcggatgaccgctctcattggggcgatacttgacccttggtcctcaatggtggaaagttagttttgtgttttaccttttttcagtattgtcgacaaaggagggggaaatcaggagactctcatccatggaccttccaacaagacccttaaacaaaataggcaaatgtccgacaacgcgatgataccatgtggcttgaggcgacacatgaagttacatacagtacaaggctgaccggcatctgaccacagactaatttaatatccagctgatgattggtgatgcggtgacttggtcgcttccaaggttggctttgatagggtccaacatattaatatagaaatgccgcgtttccttcgtatctacagtgttcctttgggtccgtacggagagtccgtacggagtgttaattggtacatccatctgtagtagcaatgccactatagtgcatgtattccggggaacccacgatacgcttcttccccgcatctccacatctccgcgttttcttttagaatttttgggtttgacgctttcctgtttgggcaattaatgttttacctaggtaccgttttactggggttcgtattttgcttcgtatctttaaagtctctcacccttgctcttacttgtctagtttcttttcccatttctccctccatttttgacctgacttccttgcggaccctcatcatgggctacaagataactaatatctatgtcatcacgacggtggccgtcatcggcggcgcactatttggttttgatatcgcttccatgtccgccatgtaagacttctcatcctttcacaatatcagggcgaagagtgactcactgatcatctcatagtctcggcacccgacagtacaagtgtttcttcaaccaacacggtaccaacgaggagggtgcatgcggtggccctacctctgccaatcagggtggtatctcagcatccatgcctggtggttcctgggtgggcgctctagtttccggttttgtaactgattatctgggtcgtcgcggggccatccagtctggctcagtgatctggtgcattggtagtgccatcgtgtgttcttctttcggaatcccccagcttgtcgttggccgctttatcaacggtctttccgtcggtatcctcagtgcccaagtccccgtctacgtcgccgagttagcccagcctagtaagcgtggccaagtggtgggagcacaacagtgggcgattacatggggtatcttgatcatgttctacgtctcatacggctgtagcttccttgagggtactgctgcatggcgcactccgtggggcttgcagatggttcctgccgccctacttttcggcttggtgttcttattgcctgagagcccgcgttggttggccaagaaagatcgctgggaggaggctcacgaggttttagcttcggtccatgccaaaggtgaccgaaatgcgccgttcgtgcagtccgagctacaagagatccgtgaaatggtcgagtttgagcgcagcaacaaggatgcctcatacctcgaccttttcaagggccccatgctgtaccgaacccatctcggtgtgttcactcaaatttggtctcagctcactggtatgaacgttatgatgctttacattacatacgtctttggtatggctggtctcactggaaactcgaaccttgtcgcatcctcgattcagtacgtcatcaacgtggtgatgaccattctagccttgctctttattgaccgctggggccgtcgcaccccgcttttgatcggttctaccctcatgatggttttcatgtttgccaacgctggcatcatggcatcgtacggcaagccagctccaccaggtggtctcaaccgaacccctgaacagtcgtgggatctctctgcggctccccaggctgctaagggagtaatcgcttgcacctatcttttcgtcgccagttacgcaccaacttggggtcctgtcagctggatttacccccctgagctctatcctcttcgcctgcgtggcaaggctgtcgcactttcaacgtcgtctaactggatcttcaacttcgccctgtcctactttgttcctcccgcttttgaaaatatcaaatggaaggtctatgtggtcttcggggtcttttgctttacaatgacagtccacgtattcttcgccttccctgaaacagctggcaaaaccctggaggaggttgaaaccatgttcagcactcctggtcttacgccctggaagaccgcggtgcagtaccatcatgttcgcaggctggagcagggagctattcagtcagataaggcggcagatcttcgcgcagaagaaggaaccgtcccagctcccaagtccagtgagaaagatgccaccgttgcgcaggttgaataggtacctagcgtccatgactcagtgcagaatctcgttcactacgccgtttccattttgtaaatggatccagcctttactaattgcacaagttgccttttatcctttcacgtggtcgggctattacccccaaagtctcctaatcatgatttaaccgcgaaataccaacggggtccgagcccctcttgcttttttctgtgtatgttcaaattgtagtttgtgtaagccaagataaattaatgataatctcctgctactggtcacggaattatcttgctgaattgctcgtcgatttgtgctccagtgtctgctgtgaggtttgactggttgtaaaaaattggctgttttaccatttaggtcggggaatctctaaagttcaagtcaatagcccagagcgccaaagatggggattgtactaggaggttcatgttagtcaagacagccccgggttctccggtcaaaataattgatggatgggtacatagacatgactgatataagtgatgccaacccctggaagcccagaaaggaatacgatgagcttagtcgcagtctctacatactgctacttacgccacagacgtatccagtccactgtgcaacggacccgtggatatccaaaatcagatgggtaatatcaatgtcagaaggtcttctttcacgctgtaaatacacaataacttcatagtgacacttgatgctcaatggtatcctctgttcaaatgtgacttataaaaataatccggccgacaaaaggccgagttgagcatgagcagttagaagcatccaacacccggggactagcgcggattatttaatcatccaattcggggcaatcctcgtaagtatccttagacatttcgtcgtaaggcgccgggagggtccaaatgaggtcgaaactatatgaatgttagggaagtcgagccaaattcatgagataagcaatactgacctatcatcgggataatgtggcgcatcatcgacacctagtgtctccaggatgtccgtcagtgtatcgtgctcccagcaaatcagtatattgccttctttgtcgtagccatcgataaagtccttaacgcaatctgggtcgtcccggtcgcaagacgtatccacagtgagaccgaggtcttcagccagcggcttaacggtatcgcggggacgggcgcgttttccatctgtccattcatattagcccttggtctagtctataatactgcgtgccaaagccgcataggggaagggtatagccatactgctcttaggtgtttgcgccatgatatgggtgatattataatcggaattctcgccgaaatttttgcgaaggcattgtgcacgttggactccttgtgcattcaatccagttcctccatcactgggtttctccccgtgtcgaatgaggtagactgtaggagagtatgctgccgcaacagaagcaatggccagtacaccgtaaggcagaaatccgagcatgactgcccaattatctggggataatagagaaatggatgttcatctcacaggaaccttgggagtaaggaatttatatatgagattatagtctactcctacgctatactagtacttgagcgaagaccaaccattttcgaggtcgacagaccatgaaacattcgtggtgtgcgattggtgggtggttggggctaggtcttatgggggaaatggggcccgagacagatcggagccaatactaggattgtcagagtagcattgaacttgcagtgacttcactcattggctacaaatggaaactcctatttcctgcagtgttatgtcctgcattcactatcaaagggaaagatgagccaggtcatatgtaccataatgggcatgtcagtccgctcatccgcgccgaaagctgcaaaggaactagaaaacttagaaaatggttgaatgtgcagttggcatattctgttgagatctagatttcattctttcttttccatctaaacacgtgaatggaggggtttccaatgagtttctgtgttgttcccgctgattttgcttctagacgagtacccggtgagcaaagagaatttattcggcccgttgctcccgtatctaacccttttggggggggtgctggaccggatgaaaaaatatttgtagtcatacctaggtataacttttagcgaactgtatgacgaaactatggatttagccctattcatctatatcatctatgatgcatttctatcgtacaggtcgcagctgcgtccagtgcgccttatccacgggcgccctatccagtgacgacatgatatattacagtattacagcgtcgggtagacctggcaaacagctgtggtgctctggacagcaaatacgacggggatgagtggcagaagctccaaggtgtcgttgcgtgggaacacgacgccgacctctcagaagccaaaacccatcgcgtccgccacccgaacgtggccactagactggacgcaacaagagacatctgggaaatgaatatacgcagagaacaagccggtagaaggaggatcagtgctgatgacagagcggtaggcttggaggagattatcaaacgatagtgtgagaagaaagacgaaagatattgaaggtatggcagcagccgatgccgacacattacgtgcttattgactattttgactagaagttgaaggttttctaactcaattggagagggcactctttccttggtgaaaacaacggtgcgccttgtagggctaggttatagctttgaaggcttggcgatccggcaaccgtggtgcaaggggccgggccttggcaaccccgatacggcctcatgtctgacatgccatgaccacctgcgatatcggaagacgattggacaagctaaaattttgcggttttggtgctttcgtcaagacttagagtgacgtcggctttgttagagttcgttagatttcaagcagggctgggtaatttcaaatatactggaagggacagcgaagctgcattatatatttcttgtctttccatggacggcagatattgttgactccataatttagccgctgttacccctaatccgtccgctgctcttcttaatgacttccagtatttatcctttcgttgtaagatctcgaaaccttgttctgcccatcgatcatcccaagggggaagtgggtaaccccctgtgcccggcgctgggttgccggccaaatctgtcaagaaatcgaaatattctttaatgtcaggctttacttcgtggaacagggctgtatggcctttgtattgaagtctttggacctcccaaaggtcctgctcttgtggcgttggcaaggataccgcatttcttccggcaaaatatcgggcaacagcaatggcctggtattcataaactcggaagctgatcgccgcacggacctgaccgaccagagccagagatggatccccgatcttgaaaatgtgctggtaaaaccctgctaaccggttgttggaggtcacaggatttggaactaggaatggataggacaacttgtacccagtagcgaaaatgatcttgtccacgccccccaaaaggctgttgtcggagaacacgaccctgatccctttctctactgtctggatctctttgattgttggcctaatattgacattaggtagatcccatgcggattggagagcctcattcttccatctctgggatagctcgagggggcctttcacaatagcatgtaaatcggcgacaagatctgctgacgagacgctgcctccaacaaccaccacacgcttgtccacgtaatcgtctgcttttcggaacgcctttgaatgtttaaatacagccggatagagcgcgaaggcatcacttagccccgaaataaagggaacaaaaggcacgctgtagtggcccgatgcaacaattacagcatcgaattgctcttcccaccaatagtccttggggatgttaccatccccatggccggactgacgaagtgatattgtccacttttggtctcgcttttcaaccttttcgactgtcgtattgaacaaggcaaggtgaaggtagtcttggaatacatcttccaagtattttttcaccacccgaaacggccgggttgggttggaccgccctaactgtcttgttgacgatgctgaatttatctcggggaagggagtgtgcgtgaaagccatgacttccgcgccgacattgctgtctagaccctcgtaaatgcccgtgcgggacgttacatcttcaggagaaggaggtctgagcagtggaaggcgacttgggatttcatgatcctgttgactggaagactcttgggatggaaacggatcgggaatctcatcgtattgccaggtccccccaatgtgacttcgtcgctcgaatagacgtatggtttggaaaatcttttcttcttgtaaggctttgacggcagaaatgccagatgggccagcgccgattacagcaacactttcataacggggtggcatgacaagatgtcgcttcctggttgtttttgaaagaaaaatatattcccattgtctgagagatatcgtccataggatgtgagactcttttaaatgaggggtgtttgctcatccattaactgtacaaaagtaagcgatgatgtcaaaatactccaccttgtcggaattgcagctaaggacgtgatgggacagtgttgctagacaccagctgtgggatgactgttcgttgggagtaacctgcaagattattaaggctagtgttgacgcaatttgagattgatatggttgtatctttgatccaatcaacatccgccatgctggtcatatggctggctatcttttggtgtgcactcaacgtcctttgggcaaaatcccacagaagacggatgtgcaagcaacggcaggcccggattgcaactatgtaggggaagttgcaccgaacgtgagactataccgtaatgagatctcaagatcatctagcagcgcactcccattccagctcactcggttctttccaataatccgtgccactcggtgtaaaaccgagtttctgcaacaactttgcacttctgctgttttctctctctgtctcggcgatgaatcttttgatccctctttcatcgaccgaccactgcataatcgccttggatgcttcctgtgcaattccttgggcccagaacttcggcgagacaccgtagcgtagctcaatcatttcgacccatgatggcagcgcaggatctccaggaacacgtaacggcatcgaggttgttgtggcatcacggagacctgcatacccgacccattcggaggtagcgagatcgatattattgaggtccgcaacccgaagatagtcatcgcctttgagcgtggtgaaatcgtcattttgtgtggagtgattatcaggcccgaatgtggatggtccgcgcaaccccacagcaaaatcacccaacccgcgcctttgccaacaacgctcaatatcacgcgtctggatcacatcatgtgtctccttatcactccatatcctggctggaaaatgatgcccgaaacccatttgacagaactccacatttgcatgtaggtcggaataaagcgcccggtatgaattgaaggagattgctgttggggtgggaacgatgatcaatcgaggggtgaggatagcgaactgatcaacagagtctccgttacctgaacccattttgcggatgatcgggccctacagtcaacccaaataaaagagatccggactgtatatatgcttttgagaggaaaagaaaaggtgttgacttttccctgtaggtcacgtgcacgtgatgttggcacatacccttccaaccatggaagcttgacatgttgactgtttagttgtatccggaggcaagaaagaaagagaaggttgcaggtagttgcctcgtaaaagcacattgtctcgctggtcagcgccttctcctttggatccgctcccgaatgccttccaaactatccatagttggctgtagcgtggtgactctattgcgaactgaagcctaatatggcgatcttaataacaggcgatggtggtttacaagccattggtggattgtaattccccaactttctcgcgtcacactgcgagtgatattcgccatctcgggctgtacaacgtgcgttaatattcaacgccctgacaatactacatgtaatatattaacttacctacctcgcagttcctaaggccgtattcaattacagcaatatctctcttcggtgttttctttttctcaacagccaagctcattaccacagacaggcattgtcctgcatcttcaacccttgcttttgcagaggtggatgccatccctttctctggtcggacaagcgaacaacatctgacacagcgcaaaattttcgttattctccagagtaacaacccgatgagtagccatggccgaggctcgtctagctggtccagaatcggttgagcaagaaatcaaaaccatcccaccccctggggatgtggaaaagtcgcaaagcgtcataacagagatcaatacgaatgcacagattgaccagttccctcttcccacagaggctgagagccagacattgcgccgagtttcagggacactgcctcttgtcgccttctcgctctgcctcgttgaattcgccgaacgtgcatcttactatggatccaaaacagtgttttccaacttcatacaatttccacttcccgaaggtgcgtggttagtctcggatgaggtgtttgctcgcagctgaccaggaatttgtaggcggcaatggtgctggcgctacgccacggggtactcaaaaaactgccggggctttgggtatggggcttcaagcaagctctgcattaacattgctgtttgtcttcttgtcatatgtggttcccatatttggcggctggtgggcagatgtccatgttggtcggtacaaggcgatcatggtcggtgtggtcatttgtggcgtcgcccatatgatccaaattatcggtgctattccctctgttcttcagaagggctcgtccaatgctgctcccccctttattcttggcctgctggtattgtctgctggtgctggaatcttcaaaccaaacgtttcacccttgatcctggaccagattcgccagaagaaggcctacaccaagcagctcaagtccggtgaaaaggtcatcgtcgatccagatgccacgaacacaagaaccatgctgatattttatggctttataaacgtcggtgctttcttcatgctcgctactacatataccgagaagtatgttggattctggctgtcgtttctgttgacgggaatcatttatttgctactcccgattctacttttaacagttcgcaatagaatacacaaggagccacccaataggggatctgagctcgcacgagcgttaaatatcacgacaatcgcactcaagcagaacaagtttcgagtatggcgtacgaacttctgggaagcagcaaaccctgataccctgcacagtaagggaatcacagtggactggacaagggatgcggtgaatgaagttgcaaggactctaggtaagtctgtcaagtcatactttgttcgttcgcccctttgagtttgcacacacatctattgcagcaccgcggtgtgtggtctttcacttctgataccatgcctgacccaactttttgaacagacgcgtgcgatgtgtttttattctttcctatctggaacctcaacgtcggtggtattggctcagtcgtgacaaaccaaggcgcagccatgatcacaaacggggtccccaatgatgttctgagtaatttcagcccactgactattattgttgcgatcccgctcttgacattcgtggtttacccgactctacaccgttatagaatccatgtgggccccatcacccgcctcgcgtttggattcttcttggcaatgatttccggcattgtagggactatcgtgcaatggaaagtatacaagctatcgccatgcggatattacgcatcaacatgtgacaccgttgctcctatcagtatttggtggcaggctccaaacattgttcttggggcattgagcgagtgcttttgcaatgttaccgcatacgaactggcatatgcgcgatcacctccgagtatgaaaggcctggttgtggcaatcttcctatttatgaatgcgctctcgagcgcacttggtgaaattttgatcccagtcacgaaggatccctggctattatggatctggggcgcaccggcagttgcgttggctctccaaacaatcattctgtgggtgagattcaaagggctcaacaataccatggaaggaagagatgatccccatcgctctgaggatgaggcgaagagcgatagacggacgcccacgggaaatacaatgaatgtttgacctttgagccggatatctcctaggttcatcatgatatgaaagagtgcaaagtttaaagctctccctgtctcgtcctcgatgaaacgtttgcctccttgagacatttctgctaagtgtatatggatagctggtcatattataattattctccatcgagctttctgtgagaatcatgcgtaggatagtgtttccccaacgtccagcccctttcaagaaaagaaatgcttagccggttcttagggctcagcttcccatgtccgggactagtattagatagtcaatcattactacaacacacgttgtccaatggttcctaatacgatttaaacacacaacatacaaaaatacacaggagtgatattgtaaacagccgctagaggtagggagggagcctagcatttgcaatcaagggtcgtgggaaagtcagcaggggcggctcggctaggcttgtagaacgaacagaatgacaccaatatatgtttcatacttttcttttaacatgtgtccttttaacatgtgtcagagcagctggtgtcggggcgtcaaatctatattagagactgcgaaacggaattccgtatcgggcaaatgcacatgcaattcgggttgctgtatccaagcacgtgcaaatcttggaggctttttcatgtgatcccgagtgttgttcgaaaaaaaaacgagggcggtgtgttgatgtcatcacgtgcatccgcactccggtggtgcttaactttaaataaggtacggagtacggacgtatggggaggcgacttaaagatgccccaggcggcttgtctgatctcggggctgatgcgcgatacggacattctaaaattatctcgtagcctcttttttgggtctcgagatccgaactgtaacacgaaacattcaattaaaaatgaaaagaacgactggggcgaaacgacacgttgtttttggtagctttctgattgggcgggtgttagaagaagagacatcaatgtttatcgtggtgattgagccaatattaaacttcattcaagacagaatcagtagagatctcacgtacattccgggcatagaggtacctacctaggtaggtacctacgtacgaaatccggagttgtacaacgttatacgaaattaagcttaaatagggcccaaagcagtcctccaatgtgctgatcatgctcctggtaaccaatggagtgagttggctgaaaaatcacgagtcatctcgatttagcaattttccaggcaaatcaagtcgaatgaccaaaaagggcttaagttttcgacaaatgagggaactcctattgctactgaaagactcaagttgaggactcgagtgccggggcgccagggccccgggggtaaacacacttcgtcgcccgtactccgtacaacacacagtaggacaacgtgatacctgccaagcccttttattaactcctttcccaacttttgcttattagtggatccctagattctcccgaggtcgaaaagggggttgcgagacttcccgtgctgtggatagcctcgaaggcaacgccgaaatatgtcgttagtgatctgatagcttcgagagatttcgccgtaggttctagcatggggtagtgccagattgaatgagtgtccttattctggtaattgattgtatcatttgtatcacttcgcagaaaaagtttcaatggactaaaaattccgttgggccccagaaacgttgaaagggaaaaaaagagaaatgaggctagcgcaatgtgaatccatgggacaagcgcgtccacccgctaagcgatgatccaatcagaagtccgctcccctgtcagtgcgcccaatttgacagtgttctggaaaagaattggaaaaaggggattggtcaatgtgtttttgagttccgacaatctagagctcgttttttttttgggcctaggggttcctttatgggggcaagggggcgaagcagaaaaaaaaaagacaagaaattaaaaaaaaccatcaatcctctacatatttcctgatctctgtcttctccaattcaacgatccaacgattcaaaatggctgtgacacaaaggcagcctgtcaagcaggctgaaaaggtgtgggataactccaaaccacatgataaacagtcatgcatatactaatctttgggttccatagcagacagacgttcccagcttgcaatccctcaaagatgcaatccccagggaatgttttgaatcatccctcgcaacatccctcctctaccttgctcgagatatcgcctattgtgcagctctgatttacgctgcactccacattcatctcctccctactctgcctatgcgaattgtcgcctgggccgtgtacggtttcttccaaggatgtgttggcacaggactatggattcttgctcacgaatgtggccacggcgccttctcaaagcaccaagggatcaatgatttcattggctgggctacccactccttccttatggtgccatacttctcatggaagatcacacatgctcgacaccatcgctacaccggtcacatggaaaaggacaccgtctttgtcccctggaccgaggatgatttggcatcgaagcgcaatgtcagcattgagcagttgaagcaccttgctgaggaaacacccattgtctcctttatccagcttatcgggcaccaattattgggatggcagatgtatctcatcctgaatgtgaccgctggtaccaagagtggccccgagggatgtgagaaggtgaagtatgaaagccactacaacccatcgagctcaatcttcaccgccgcccagtggaagctcattgtctactccgacatcggcctgctgatcatgggctctatcgtgtggtacactggcactatcatcggagcgtggaacgtcttcttcctctacgtggtgccatatctctgggttcaccactggctgagtacgtcttcactcccatcttacctgcgtccttagaatgagaactaaccgaatacacagttgccatcacataccttcaacacactcaccccgaggttgctcactacaccgcagaagcctggacttacaccaaaggagccctcgctacaattgaccgcacaactggcttcattggccgtcacttcttccacgagatcattgactaccatgtggtccaccatctcttcagccgcattcccttctaccatgcggagaaggccaccaaggccatccagcccatgctcggtgaaaactaccacgagcagaaggatgagggcttcttgtactccttgatgatgaccttccgcaagtgcatctatgtctcggagagcaagggacgcgctaatggagagcctggagttctccacttcgttctctcagatgagagcaaataaaaactggtactgtgaggtgccaccagcatagccatattataaaatcatagactaggtttcggttatagattttggttatacccctgcaagtgtttgcgaacaacgatatatttcgccggtatgtttgacttctggtatataagggctacaattggatataagtaaatctaatttactgcctttgctcgggtaacccaccatatccacacatattcaaccttgcaaatcttgcatatgatcaggatgcagtatgttgtgtagtccggggttctgaccaatggcttcaagcgtcgtttggcgcacaatgggtatccgtatatgattcgcgagcttcgactagggtttgagcgagtcgaagaaagtggcgtagagatctccaggcgcaaccgaggcagttcggagtatctagggttgctgctatatcagtgagcaacgcaagacgggtagtttcaaagtaactaagtaaagaacacaatgaacgggacatggtgggtgcccgagtaccctaaggaagccgatcagtcagtactatttagatcaaacaaatgacgggccggacggaaagtataaagatgcttgtttgtttgcatagttacggaaggccgaaccatatgaaacgtgaaaccatgcggaatgtgaagccacatgggcagtgcgaacattgaggaatgcgaatcgagaatttgagagctctaataaccgagttcttcaacattatatagtttccgagagatgatttgggtcgtgtggatgtgtaccgtgtgggatctagtcgaaatctgtaaaaataatgcacggcaacttcaccttccgtatagtcgctgacagacgcgagaggcaaaataccggaccgttgggtgctgtgtgtaggttgagaacgaggcctgcagcgactggtaatccttaaaagttatggtaggttgacttgtgtcggtaatgactagcttagcctcgaaatcgttaacgaggaggaagagttcagtttgaagttttagacaccaagggataaagtgagccccgagtgggaatgggctcaaaaagctttcggtgggcggatctggacaaggaggacactgtaacagcaattatgggagtcgatatgagttagcgatagtggagaagcgtgcgatgctggaacgtcgactcaacggtaggtgattcggaatgttcgcagctaggtatatggtatcaacgccggctggtgacgccggtactcaacggcttgctggagtgggtggcagatgttgggagaggctcagatcggacgactaggctgttgaggcaagccgagggcgagttgcaacaagccactaataccaaaacgttgtgcactgtgctccgaaacacgagaaggcagtcgttatggcttgtggtgctggctggatcgatgatcggtggaagatcaggtcgtgaggcgcccccttttgcgaggtgtgaatctttgtgataaaatcagattaacagaagttaatttgcactgggttcctggtaggtagtgtgaaaggtaattttggcaatagcaatggttgcgatagcgaggttgatgggagagaagagcgagataaccacgcatgtacgcatgctccgttttttcaaatatgtaacaaactcacaagatggacagctaaaaaagctataaaagaagaaataatcgacttaagacgtgatggaaagaggctaggtattccaaacgagacagacaaagctttacttgctagtttcataggctcgtgtataatgcctacatgtatttaaataggggacgcaaaaataaatcaaggccaaatcacgcatcaaattcactctttctcctctcctcccgccgctgccaaacaaaccaccccaaggtaatcatcaacttcaggcccatggcaagccatatactggacgccatactagtggtcttagtaagacctcccgccgtcatagcgcccagaaacaatgcgagaaaagcccctacccggcggttgcgcttcgggttgaatcttgcagtcagctttggatcgacaaggagatcggatagcatagccgtcacaacaacggttgggatttcatccatggccaggacccgggaagcacatatctggcctcctgcttggaaagctagaagtgagattgctacgatttgcagccattcgatcggagcccgggggtcctcgggctttggggtgatgacctccagctgtataaggattgctgttgccaaaagggcgacggtctgaatgccaaatgaaattatcatggttgagcggcgtcgtggcgtcaggaatcggtgcatgtggatgaagatgatattgcttgcaatgaagacggttagggcgatcagagacttcgcccagagatatgcgggagttgcaggctgaccggaggcacccaatgctaagaagatggtatttcctatgtcatttgtcattagccttgatgtgctttgcaccactggaataaattgcttggtaactatagactccacatacctgtttgcatacttgagaagctgccccatgcattgaatgatagtccatctaccaaaccaccaacaaacccgcatattataagagggatatcggtatgtttcgtgtctatgtctgctcggaagtgtcgggaaatagttgagcggaatgtgttgtcttctgtctggtttccagagacagacactgctgtgctgcctccggaagaccaaatccctggtgtatacttgaattcttcattgggccgctccaaccgagaggttgcggttgtcaagtcggtctggtagatggaacgggcatcaggggcgcgggccgttgttgtgagtggctcgataaatcccgacggggaagggggccggtggtgcatgttcgggattattgtgaaatatatattattaagtcggctaagcagaatagaaccaagtttggaagcttctgatttaggtgtgctaatgtgaaaagaaatagattgcatgacacagcctttctttaatactgaaccatctctcggatacattccgatcctccccatgaaaggaataagctggattttcgccaagagagataagagaacatgccgatgacatgaaacaatgatacttgccccatccctacaggtctcgtgtatgtgttacggagtacaccggtgagggatacgttgggagccgaactactcgatctagatctactccataccgctcttcatcccacatacaatgtacgtaggcaagcattctaatgttgactatcgatataaccaggttattttgcaggcgcaatatccataaaacgagtacccaaacatgaagactccgtactccgtacacatcctgaaatgagtggatctcacagatcccactttagcagaatctgggcgttatcttggcagtattattatcttcgtgtgggtaattcatccccggacttcattagaaatcaaactattcaatacgacctcggaagctggggatttaggattggccttggctcggcggagcccgtcaagacccggtccttaggctcctaaatcccaagaggcaatccgcagcatttactcacattccttcttggcggcatggttatacctcatggcattgattggctatatctgcaaaatcaatgcacggcaatcgaccgaatttaaatttggaaccatcgtgactagtcattctatttaaactcgcctacccctgtgtttatcggattgatatgcaaatgcaatcacctgggctgagatggctccttagagagtgtatgtatcgcctgctctggcccctgaaaacgtccaaggtatcaaatgtagactttatttgccaagcgatcgacatatccaccgagactagtctgttctgggcctccaaagcgctgcagtgagactagtcgccaagaacgatctccagcaccatcaatggttcactactagtgttatctctgcacgccaacggctaaagttcccatcacacagcctcgaatacttagatcttggcgtttactaggttgactgcgtcgacgagagaggagttcaggcattgaggcgcgctgacgggtcaaatcttggcatattctccttgtaagggatatgtggcctgcaggaatatatgcccgactcgaaaaggagaagtacaatagcgatcacattgcagagtttccattggcttcggaagttggaatttcccagaaaggaaaaagataaaaataaaaactactgttcaggctcaatggcaaaaaagttggatatttccatacgaaaaagcaatactacatgccaaggtgcgagaaatcgtgattccttcccatgccgctatcttctgactaggcaaggtcaatcgcgcgatgaaggcgccaacgatacgcgataacgccaagagggatgtcttaggttcacctccaattggccagcccgccgactgggcagtgttttggcttggactcatgttttaaccattctccctgctgtgtgcgtgacatcaccacctgatcatcgtcgaccaaggatatacaacatagttgaaaacccgctgtactacaattgctgccaagaggatacccaagcgggctcctttcgattctcgaatcagatcgtcatgatctagtcgaaagtttcatggcattgacagagatgtaagtatgtaggtagggtttcatgcaacatactgcaacgcatcgtaacacacaggaggtatggctatgtgggtagttcagctcacggtcttggtattggcctttaagaaaataaggcccgacggcaagggtgaagggttaaagattaaagtggggatgccgaagtcaacgccacgttgaggctttctcgccagttggatgctgtcacagctgtgtgtcaacattctttcttatcttcaagggcgatcctaactttaagcatccgaaataatttgcgggggtaccccaacccccgctcattgaaagggatagcccaaaattccgctagggctgcgccacgcttaaaagcctgtccggcgtgggatgtatgtcgatccttgacgatccttgtcgattattcctgatgccttggataacagcccactttccgccccttgctgcaataggaatccacatggatactgataacatccttcgccaaggtattgcgtcagtttcatggtttctaaggttttttgtcggaggaatgatccgggaaatgcttgcattgcatacaattctctcgcgtgtcggttctgcgtggtccgcgtggtggtccagacccgcgctttatagttttggcataaataaattatgcctgatcaaaatgaaaagtctaaaactgacgtgtaaggcagtccatcggtgagccctgggttgtacggggtgggagttcatagatcatgcgagatctatgcagcgtaaaaatcatacctggcaatgtgagagatctcacgattgttgctgccgtggctctaactataggcgctcaatgttttgttcaagatactgcgattattttaacgatttcttttctgggatgttcatgccactgtttagcaaaagtctgcattatccaacggaccaattttgttcaaatggttcgtgaaagaaagtgtcaaaaagtagcgaatcaatcgctttaatcgactggggtagggtgacagcacggatatcaaggtttgggtgctctaatggggtttcgccctcaaaggtctgatcggtaagttctagcggaatcgccaatgcataagtttccatttcgttgctcagcacactttgggaatctgcagtgtccatcaagcccaggttcggcgcggtattatcatgatccgtttgcttcgctactctgttgtgttgcagtggctcgtccagcatcaaagacggcgttgtaggatactgggaaaatgcgtctggtgacgagttgcagttaaattggatgaggtctttctccggctccaactcaatattgatgtcatttaagatctctcatccttcaacggaggacgaatgcgcgctagctaggcaactctgtcactgtacttgatttatgtgccgtgcaagttcgtggattcgctgaatgaaatttcagatgtccagggaagtcgaacaaggtcccgaacgatttcaggaagcggaggcagtctctctgttgacatggcatagtccaaaggcgtcaatatcaaaagatatgcgctcggacaccgaatgaacgcatcttgccagctcgtgggacggttggccttcggcaacatcgatataatggaggctctccccaggatgttgctggatgagcgtaattggcgtggtttatcttcaaacaggctctgcatggtcgcataagcaagctgcaggacatggttggtcgagacggcaacgcagtcagtgacgtcgtatagggtctccgagtgacggataatttggctcaccgcggtcaaaagtcgttgccttacctccttcacgaactggtagtacatgtatgttatgtaggtcaagcttgtaactgggtcatggcgacctgacgttgatgtttcgcttggtaaatttagagggaccggaagcttccactcgtcgagggatcttttgatactttctatagtcgaaagaggctttgaaattcaatcatagacagaagccgtcttggagtctttggatgggtgagcgccaaagacgccagatccgtaagtagcactgctagcttgcattgttttgtagtgcgtctagtaaacgcttcctggtattgtagttgtagcttgagggtgatacaactcctcactgacattctctgtgcttagccaatcactccatccatataacctagttgaggccacctgaggacggcggcgtaggccaatacgtaggcttcggtcacgaaggaggatagatcatcaaagtcgtttctcaagcgatagcgatattgccacattttccaccgacggggatagttgagcgttcatgagcacggcgtactcgatggcctttgtcaaccacaagcttccagcctggggttcttgcgcagaggtataaagcgtaagtagaacagcgccttgcgcatttgcatgagactgttcttcggctctcagttggaataatagctccacccagcgtgaccaattccgtccgcggcaagtgtgacactagatctggggttgcctacattggctctgttgtatagctgtttcagtgcttcccgcatatcattaaaccaacattcgcgcaatttctccaaagacgcgaactattatgttttagtcagagggcgggagctaccagaaggtaacatgaagcctaccggacagctggcgacaagcaacgattgcaacacgagaagagatattttgggacccgtagattgaagaactcagcctcatctaagacaggtaccagtgagtgaacgcgcttgaagtactcttggataaactcattaagcgcatcagtgcctggcaaagtgaagcagtcatcggaactgagatatgctacatcctcggaagggagcgacagcagttcgataaaggcgtattcggtatacggtacattggggaatagtggagggcttgaccacggtccaaactgagaccatgtgcacggagctgggatacaaaagctggataatcatttgactggtgcaagttggcgtgccggctagtaatcatgctgtttgaccctaaaccttggttcgttggcggcaccgggtttgccgactttgggtacctggtagacgttattgaatggtgcttgacgcaagtctttcgattatggtctcactgcctaggatctttagcgccaagattacattctgtgcgaccgtcttgccgacaccgagtatacggagagcccaggagtgatgcatcgcagcgcaaagtgcgctgacgataccagcagcataccgtaggcgatcttcttgtgcgtcgcagcatttcattttcaacatccagtttatttgaagttgtagcctgcaatggaggtaacagagtgggttcaggtgaaactcgggtctgcggtctggggaatgatcagcagtcggcccgccaagattggaagaagccgactcgtgtatctcatatattcaaggaatcacgccacagtggagattcaatgtatgtataaaagcagctatgagattcctaaacaaaaggaatggacagtgaggggggagagggggagagggggagagagaggaagacagcgaagtgagagctgatctatctacgttctgtcttattgatgcctgaggcgaataatcctgccttacagatcaggcatttaacatagcacatcctggatctatgcaaccttagctgccatctcggtggctcaagggtctctacctggtattgattcttactacaagtaatcatatattcactgtacctagtttataattggattggtgccccgactatttcacaactacaagcttcttcttgctggagaatttagctccattggcttcgaaggcagaaagatgcccagggatcagatcaaggtattgcatagccctgttcgttagttgtgatatcaaaaaccccttgttcatccatgggtaggctctgcggcaacgcgacttaccccgctgaactaaattatgcttagccgcggaactcggcttctccacatttccccactctgggttcttcttgatgtaaacccttgcacttcaatcatctaagctgctctaacactaccagtaggtataccagttgcacagaagggcgaaacgaagcagggtgtgctattaagccgattcaggtaccaggtccgagtgggaacactgggcatctgcgcatttatatgactgcttcaacgtagatgcaacaactttaaagatgcctataattcctattaattatttcttttcatatgatatattgaagtatgctgtatgaatgtttgggtgagcgggcatttggccaagcggttatcgttggcgacaattggtgcaccgcttgtttgggacccgctcatcctcagctcgagtgccgtttgatctcgagctgccggatcgcctccgggagatgacttttttattttttatttttggcaacatttacattgcctccagttgccctactaagtattctttctggccaaagaaagtgaccgtggcatacaagtccaaatgaaatatgccgggaattctcactaaaaggtttgcccaaattattactcgacacaaagaaattgttccaaaagttgtgctacctagtgagctatcctacctctaaattgaagcttaaagcttggctttcaggagtccagcctcgatttctttcctagcatcttcgcgcaataccctcttcaagatcttgccacttgggttccgtgcaatcgcaccaacaaatttcacgccacctgtgagtgctttgtacttggcaagtcggcttaagacgtattcttgaatctcagcttccgttagcttggctccttgatcgccggatcgtcgaaccacataggctcgtggatactctatatcggcatcagcgaaggttatcccgatgacggctgcgtccacaatctgcggatgcgacaagagcaccgcctctagctcgggtggagcgacctggaagccgcggactttgatcagttccttccttcgatccacaatataccatttgcgagtgcgctggtcacaataggctatatcgcccgttttgaaccaaccctcagcgtcaaaggcctcagaattagcctcgggattgttgaagtaccccggtgtcactgtcggacctcggacacacaactcgccacggacgccgaaggctgagatattctttccgtcttcatcaatgagtctgggggaaatcgatattagttgcagacttgagacaacgctacacatccaacaggggagttcgatacaacgcacttggcttcgaggtttgggatgagccgaccgacagagcccgtatcatcgtgctctgggtgggcaaacattgtagccacacacgatgtttcagtcatcccccatacctgagtgaatggggtatcgttgcccatcagggagcggaacctggcttgaacgtccttgtccaaaggagccgctccgcaccctgccatccgagcctttcgcaaatagggtttgtttcgagaaagaggagacatcagaattgctatcacgattggtggaacaacagcaaggtcggtgacgttgtacttttcgactgtagtgaggtatgtctcgaggtcgaaccgacgcatcatatatgcaactgagccagcttttagtgttgaaatatgcgacactggagctgcggatgcatgaaagatgggtactgcaatgacccgtgaaatctattcaacagtgtcatgggtcagtgatgccatcgcattaacttgtcaaggctctttccaagccgataacgggtgaactaacagggtaagagcgcggattgacaccgtgaacaagctcatgctgtccaatgaggttgtggtgtgtgattgtcacagctttgggtagaccagtggtgccactgctaaacaacctcgccgctgtagtctgttggcaggtttcgagatcgttgaatcgcacccaatcctcctccccgacttccaatagctgtttccacgatcgcattccagccgggatagattgtcccagattgtcgaagatccaaatgttttgtttgggtatattcttcccctcagtggcacgcatgagagaatcgaagatctcgggctcggagaaaaggaacctgctttcggaggccttgatatgatgagcgagctcatgaggagtgtaagatgggttcgagcccgtgaaacatcctccagctccaataatggccaacacaagaatgctataatttatctagaataagtcagcatcctgtaacctcatccaactgcatggtggaacctccgtacatcattgaaagaatgaatgagaacgcaatcgcctttttggagaccagattcccgtagaccggcgatgagctgacgaactagccttttcgcctggttacaggagatcgaccgagagggattgttgacgtcgatgtagatctgcccgtgtcaatttggcacccggttgatgataaggttgaagcgttgtttgtcactcactggctggtcttggtcatatggtgggtcatcaaaaatataggacaataggtcctttgttggaagcaggactctctctgctggttcaaaaatcatactgtgctgagatgtagatgctgacagctgaccggatacaagactatcagattcaattgctttattgaaaaagagctcgaagaagcagccagttttaatctcaatagatggtgtatctgagtctccgcggcttcgagtgaacccctcctgtgtttagctcggaactcggtcgctcgagcggaagagggatgatctgcccatttcttcgggaatcagtggtgtcggggattttattgggagatcaaatacagtcccaacgggataaacacaaattatgcagttcaatgtcgatcatatcatagtgaacacggtggaatcctacagagccaagcagcaccgttttatgaattttctcttacccccgctcccccgcgtttattgtgcggagaacccgttgtggaatttatacacttctctaatttgcccggaatatagctataattatacgtatcatcacagcagagtccgctcttgagacccttgccaattagatcaagggagagaagaaatgccactccacgatttggcgctcattccgagccccctacatccatacattgtacatccacacaagcggcgagtgatattattctatctacctaaatcacttctaactcgactacggagaataaagccgacgtaaatggaaaagaagaaacgaggttgctaaattataaattatgaagttctatatataaacaaggggttcaatatgtccgtctaccccaaaatatcgtatcaaaatgcttttagcagcctctgcttggctgtaggattgtcactgagatgagcgtacatctatcagtttcggcagcaagagccgaagcacatatcggccgctagacaatgttacctattagctgatgttccatgccgttatattagggttggggtgctcaccattgtaattctgcgggatgtgacgcttcttgtagctttttgtttgtgtctgtctagaatgagttagcattatgataattctttcattccatccatagttggggtacataccgtgggaccagtggagattcggacgttgtatcctccttgccctccgcttgttggctagggtttctggaaaagatagccttaaggtgattgtatcggctcaatccgctgttttgaggcattgtgagggtatggtacttgatatttccgaagtggatttgataaatttgggtctaggatatttaagcaatgcttttctgtttggctggatatagtatatgatttttttagtctatatgaatgtcttcagtctggatatccaggccctttatatctgtctggatttattgagaattgaaaatttgcatcaaccgtagaattagttgttgtggttgttcgacatacaagttggccaccgtctgcgttcgccgacttgccgacttgccggtttgccgtggtcggcggatgacgtcattaggtatcctcccctcgtgttgggcgatcggttctggcatctttcgcatctttcgcatctttcgggcgacattattgcctcagcatactgccgaattttcttgtgtcttcggccactcatctcggccactcgtgtcggccacctcggccacccactgttcttcgttcgccgacaatttcttcactgacatgacctgataaaggcgcattagcctacattccttgcgttcgccgatcagctgaaacaagtcatgtcttctcccctttctgctcggccatatcggtcaaaacgtcagcgaccgtgtgatcaatgccgttcccgcaagttgggttgtcaaaccgacggcggaggtccctgtcaacgatgccggtcggccaaactggagtgtacgtttgataatcctccaccgaaaagagcccgcggtgcgaacaatttttcgccttttgccgcccaaagtgtcgatgggaacacactcgtctcgcaaacatgcgacagcaatttcacccgcgagtccagttgggcagggagtggaacacaaagtgtcgaaccacgattcccacccatcggcctcgatccaagtaataccgggctatccccaggctccggtgttctagcccccggaagacccccgacccagttcgtgcagagcattgatcaactggaacccggttacgcccagcttttcggcgcatctgctgagtcagacccctggctgttaaggcattgttgctttgacgattctggcatgaaatatttctacaaagtgcactttcgcaacgccggaggtgtccctacggcacaaagaattccaatacacttcatgatttcgtccgaagagctcaccacctctattaagcatgaaactagggccggcgtcggcgacgcgacacgggaacgcctgaactatctagtaccccctgagtatggaaggaggctggtagctttgtgagtattacccctcaatatatgaccgaagcatcagtgaactaacagaaggtcaggtttgtcaagtatgtctttcctgccttgccaatcatttcccgttctcaactagggttgactgcgatgacatatcagctgccggatctgtcggcattagaaaaggtgcccgtgcaccttctcgcggccatctatgcgtcggcatttccttttgtcgcccatgatgactatctctgtgtgctgagcacgtataatgcgtcaccagttgacatgttgtggcggatggtctatgaactcgtgaccgaagagatccatagtccccgtttggctgtgctgcaagcagcgttgttatatatacaccaacagtcaaaagacgaaacgcgccagacgaccgccgataccccgtttttgtggtccttcgtcggccaaatcgttgggttggcctgttccctcggccttcacatcgaatgccgcatgtggggcattccggcatgggagaagcgcctccgtcggcggttgtggtgggctgtgtatgccgaagacaaatggcgcagtttgctgatgggccgtccaccgtatatccatcccgcagagtgggatgtgagtgaactggacgaaggggactttttagtgggcccacgacaaggattctcaacaagttcctgtgacaccgagattccgtttcgataccttatcaatctcgcacgaatcggcgaagagatccatgaaaccttttagtacgttttgacactcagcagagccccttgtctgttcgccggcgaagagtcaatcttgctgaccttggttttctttttagcacgctccgggcctcccaattcttgaacgcgaacttcatcgcctctgccgagctaggccgtgggctgctcgaaaagttgaatggctggtactcttccctccctgaaacttttcgacttcccaattggagcaaatccgtgaatgggcttgccccataccccacctcgattcattttgcttacctgttgctcgtggtctatgtttatcgtgccatgctaagaccaatggcacgttcatccgacccgccgcttattttcgacttggaagatttgtctgccacgtcaccattgcctgtagatgagtcaatgctggacttcatggatctcccggagattgaatcactaccagagatagctatctccgatgagtttggtactggcgatgccaccctacaagccgcagagaagtgtgcctccatattggtgaactttgcgagacgactgacgtctagcgatttcacggcattctggtactcttgtaagcttaccttcactcacactatctcatacgacttggatgctaacattattagggtctcggattggctttgccacaatttcaaattacctcatgctgctactggtacaggctccaaatatggcacatgcggttcggggaaagcatttagtagattcatggctacaggtcctgcgctgccaaagccaaagcttcccacttgtgaaactcggactcgcaagacttgatgcgcttcactgggcaggattagaaaatacctttgtcctccctgtgcatgtccaagcggctatagcaaacccagatataccggagtcttgagcagataataccgcggcactgctttttgagtgcatattcacttacatctatagaaacaaattgccccggagaaaagcacaatggtggaagtaggaaagtgctggaaagaagtctagaccgaatctagtgtacatttgaataaaagtccctttggtttgttttccttttccctactccttgctaacgagtactaccctgccaatataaactccacacttccccgcaacacccatgtacccccacgcccctgtacaagcaggaatgtaacgctgatacaaccccttgctttgtataagaaggtcagttcgcgtcttgctcaatatcgcaatgtctagacatgaagtggattatcctctcgcttgccacggtcgcgtctgcgctgcagacccttcccccggtgcacttcgatgacacaggttcaggccataacaaaggcttttccttagcaaccaccgaccggacaatctacctggatgccgattttgccagctggaaggatcataatgggctgacgctgattccaccatcagcatccgactttgccaacacattccgtgacgacttgcaggagctgacgaacagttcctgggagcttcgcacagtcaagcaatttccgaaacacgcatcgggaatattcctcagtcgcgcagacaacccgggccggtttacctacgaaaatggacgcgaaaccgaggagggatatgagttggagatccaggatggcagtgtcttgattcgaggctccggggcgcgaggtatgtggtgggggacgcgtaccctcctccagcagctacttttgacacactcatacctgcaaactggtcgcgtgaaagatgcccccgcctatgcgactcgtggatttctgctagacgctggtcgcaaatggtattcgctggagtttttgaaagatttgtgcacatatgcctcgttcttcaaaatgtccgagtttcagtaccatgcgaccgacaactacccgctaagtcgcggtcagaacgagacctggaacgaggtttactcgcagttttctttgcatcccgaaagcgaggcccttcaccctcttgtccagcgtcccaacgaaacgctgtcccgggctgagtttgatgacttccagcaccactgtgctcagcgaggtgttacagtgatgccggagatcgaaagccccgggcattctctcacgattacgaaatggaaacccgagcttgcattggactcgaaggacctgctcaatctctcccatcctgacactgttcctttgatgaagtccatttggagtgaattccttccttggttccacacaaaggaggtgcacattggcgcggatgagtacgatcctgactttgcggatgactatgttgagttcgtgaacgagatgtcccgttttgtgcaagaaacgtctggaaaaaatgttcgtatttgggggacttacgagccgtcaaacattaccatcgataagaatgtggtaattcaacactggcagtatgggcaatcagatccggtcgaactagcccgcaacggctacaaagtgatcaactctgaagattggtgggcctatatgtcgctgaaaagcaatcatgtgcctatcacgccagccccttatcctcagttcttcaacaatgcccgcgtcctcaacttcgctgaccgggacgggtggcagtggacgccggagctcttcaatcccgtaaacactactgaacaaccggatgccgaagctgtgccgggtgctctgctggctgcctggaatgatagtggtccggatgccactacccaactcgaggcttactatgcaattcgtgatggcatcccagtcgtggcgtcgcaagcatggtgtggtgaacgcggacctcgcttacatgaacaaaccttggccaaatctatcgcacaattgtcctctcaagctgtgggacaaaatctggaccgacgactcccaggagaagggagcaacgaatcaggactcttgctttcatggacaaggccaatttcagagtccactcaggacggatataatctgggctatggcagtaaaggcatggattacacccttcaactggacgtcacgggtccgttttctttgcagtcctctgatgccacacttaccttgtcatcggatggtgaattgacctttgtttctgatgggtggccatacccacttcgctctgtcgctcaggctgacggctttgaccaagaccagcctggacggatttggactaacaagaccacctcaagtcatgatgttgtgacaataccccgccagtcacagattattatatccacagacgagatatatggaagtcgtgtgtgggtggacggatcctttgccggccgctttgaagtcttcatatatggcggaaagaatcaagttttctcatggggtcagatggcttttgtagcaccgttggatgttttaaaaggctctggattgcaacatttggctgttttacagggtagcagggatggttgatatcaagtctagtctactccagcttgcagtgttatgctttctcgaatctactcccgttggataaatattaagcctacaaagagttattgtagaagcagacaagctcccaggtctacacgtttcctacccctctaggtcgtagttctaacccatgcaaagcaaatatcgggttctgattgctagcgatttctgtctcctcgaccatgtcataaagccaatttcaagcgaccaaaggattgagcctgcaaggggcacagccacgcctatcataggcaaaaagtcccattcaaatcgtcagccatctaaacatatacctttgctggatcgccgggctagaatttaatagcgagatctcacgcttccgtaggagacaccattgaattgtaggtcaagcaacagcgatgctgaagttggcgttagtaccaagtcgtagtcgacatggtaaaattgcttccctctggagttggttttctttataaaaagctccttcgggattctgctaagatctgcctccatctcacacagtaccgccacgtctgttcaggtcagtataaggaaccctacatatatattcacgccacagggacatactagagtcaactttttcaggagctatgttagcctggcaaaatagcagtgagtcctggaatacgaaggatccgccaacgccaatcacacggtagaaactcattcttattggctcactctcagagacggattttcccttaaagtccgttaagcagccataactcttaaggattggttagtgcacactggaagttactcactttgaggatataccatcgcatacgccgattcaatttccatttctcttcataaggacaccattcaaggtcctcatctgcgcggtgctttttggaatcaaatgggattctcagctcaatgccataattgcaacgcgcaatgcgactctctacttggttgccttcttgtccacggataacagcacccctaagcctgttaagtacaaagaaagtactgggaatgcctctagtacgtaccgaacaacagcggaccatctgcttttgagtcagtctcggcctgagttgacaaagggtcaagagcttacgcatttgggggatgcatgatttggatgccgtcggaagcagcctgtaagcgcttgtagagataccccgaggcgccaaggcctccgactagaataatggcctaattggaattaattgagtttcctgcgaaggcacattgggggctcaccttagtcgaaaagcctgcttcctcgacgctatgcctttgcttggcgacgagtttctcaatctgccgaatgataggatcgaagatttccttcacttggtctctgtatctgaattagaatacttgacatctgataacgtaaagctaattctccctacgtacctatcgatatataagtgcccctcgctaagctcgaggtttgggatccctgaaaccccgggaacagggatccaatatccaagctcacacatctcatcatcttcaagaggacctgtatagccaggcttaatatagtcttgccagtacttccgtgcagcccttgctgtagactgtgggagtagctcattcaattctttctcaatgattcttttgatatgtatctgaattagaatgacagctgataatgtaaaagctcatttccctacgtaccttttgataagcgcatcgaaccgctcgtctaacatcactgagccacaaacagcacctggaatctgttagagagaagcaaaagtatgaggctttgataaataccagttcccttcgttgcttcctcaaatgccaacgggtcggtttgcttgacgcggtaggtaatgatatcctatcatgattgtcactcgaatttgtccaaccagtttcatacaatcacgactcaccacagttccaccccccgcatcgcagacaatcaagcagtcgcctttctataaattgtaagatgactcaagttcgattctggttggatagggttcacaccgagattgtatttggttgaattgttcgaattgcacaaaccgcagccgcctcaggttcggacaagagtcttaaacttgctggagatatacccgcccgttgtgccgcctgcctagtatagtctttgcctttatcagaccacacagccgggacagtaaggatatattccaagtccatagtctgcagcgcagttccaaagcgacgtgccaagacatcctgagcgtgtgcgactacttttcccaagtagtcaccagcaacctccacgggcgtcttattgaggtctttgataatttcttgagagtcgctggcaggcaagtagcggaatttctgactctcatctagcaaaagcttgactccctggatgagtcgttgttgcttgcccggatggatcgactggtcagtctgataaccccatttcatgcgttcgttgtcgtaggagcatatggttgggactttctggcttgtggcttattaaaacggttagaggtatgaagttctctgttgccctatggactcactgttgccaccccctggccacgtctgaatgagctcgatatcatcagggcagtcttccaatccccaggcaacactataactgtcagcttgccactctacccttactaccaacacaaatatgtatttacccgctgaaggttgttccgaagtcaacacccactataagttttggccgctcctctagggtcgtcatgtcgaattcggaactgttggcttccttatgaattttctgaagatagagtacacgaagagattttctgcaagagacaatggtggtgggtgatacttcctcaagcaaaagtttgctcatttcgcaagcttgatatcattgactcctgcgcttagccgcaatgagcgtcggcgtgaggcatatttttacaacatcagcgaattgtggcgtcacaatctgaggtgtgtcatgagtaaaaagcgaaaatccttatttttttatcattatttcagacttcacaacactcgagtatagatacgcaatgtggcgctacgacgagcccaagcctgagcaggtgaacaggaatactcagacctccccaggtttatcctccagatggggacaaattgctacgggttcgtttccccctccatggcctatatgggatctactaaactcattagcttgtatagataataaggatatgcatgatgaaattgaacggctccaacgggtctgtggtgaacgtcccctctacacttctttcatctaacaaacaaaacagcgagtcaaaaccgcagaaaaaaaagcagagttctttcaacaggagcggcttcttgtagaggagcagggtcgtcggcgaggcgagctgctcgaagatgctgttcaagaatcggaagtagtcagaaaagagaaccgaatcctcatggccaaaattgcaagcttgcaagctggggttgagaccttctccgacgaacaaattaagcaagagatgtgtctactctaccacgatattgaacgctggcggtttactcattttgtagcaaagccaaatcttcaacaaaggaacgatcccacgccaagaccagacggccttgatatctcaacattggatatcatccaaactcacattgctgggctgatttatcagtcgttttggaacggatttatggttggacctgaccaaagtttgtgtaattatctccgcaaggccgactccgaaataaataaaaaatgtaagtggtcagaaaagccctagaggtcactcctgtcactgctttctaacaacagaaagtttccaaccacatttcccggcactggagatgtgcgatgagctctgctgtgctatcgttggaaacctctagtttggagaaacagtgcaattgggtcatcgagaaggtagaatcctgcttcggtcgttatgctgtcaccgagagaccgaaacgaatgcaacagctccacgacattattgcgcgctgtatcaagttcaaacataaattggattgccaggaagatagatatatcttctggggcagctaccaatatggattgccgttccgggataatagaatgcgtaccctgacagaggaggatacgtcggatggacacgttcatactagcctgtggcccggtctatataagattatccgaactggcgaatggtcgacagtcgaaaaagagattgtgaaaaagattgctccggagaccccttctgttggaatgatcgacgagatggaatcccgtgaagacgtcccagaattggatgagatttagaacggtattcgctgatgcgggaaactgtatattgcgactattgcttccaatttgaatatctagctatagaaactccgttgcttgtccaatgcaaaacatgcatatatcaatattcgccatcatatagttcctagacaccctcggcaaaaccgtcatttccagactccgtgtcaaccttcatggagtccatcaacccacagacctcgaagatcgttcgtggtcctagaccttccggtacaccgactactccatcggtcttgaggcgctccaaagtggccttaatgcccatataagccggagtgatcgtggcgaatgaaaagatcatgattctgaagcccatttcctctgcctcctttgtggtaatgagaggactggctccattctccaccatgttgagcagaagaggccaaggtgccagatcctgaactgcttgacgggcttgctccttcgaagtaaaaccctcaagcagtccgacatccgctccaatatccctggcggccttcagtcgacggatgcactcatcgtagccgtgttgctgaagtgcatcggttcgtgcaatcagaacaatatctgagtgcaggcggtccttagtcagcttggcggcgcgaatacgcataaggtactcctccagaccaacgactttcttgccattgagatgaccacaacgcttgttttggatctgatcttcaatatggaagccggccacacctgcctggatgtattgctgcacagactttgacaccatcagagggcctggaaggaagttagactatctctgaaccaagtgataagagtctattgtctcagggcacatatcactaacctccgtagccagtatccatgtctgcaatcaatggaggtccgaatggatccaggttggcgatcatttcggcgttggtcttcatgtcgtgaagctgagccaggccgagatcagccattcccagccgtgaggcggtagttcccgcaccggtctgtgcacttggtcagcatgcaggaacatggtgttaggcattagagttctcaccatgtacagtcccttgaagccgacctccatggcaatgcgagcggagagaccatcatacacaccaggacacacaatgagatctttggtgtctttcagcatacggcgcaacttggaagctgcaggaatcacatagagggaaacagttggctcctgccgggtcccgttgacctcgtagtatccatccttctcgacggtgattgtgatagtcatgtttgaggtttagcaaagaagatgtctttttgtttagacagttggattcttgtacgaccatcgaggggcaacgctgctctttatatcttcgggttctctaccccgcaagtaatttgcacatgcagacacaccaatcccggaggagcagtgtattcttgctcgtagaggacaatagcacctcaccaaaggcagaagtctcggtttcttggggatgtaacattccaccacccgccaagacatccagatggcttagctcccttcgcgtcgtactgattctagatgacctcagctgagtgagtctatgaagaaggcatattgcgaaagattaacagcgctagtcgcggagtaggtgttcagattattcccatcaatcaacagccataatagcgttgcatacgtatatctccgtatggacagccaaaatctagataatgcatgtttacatcgggctttttaggctgattgggataggttggggacggggaactggacccaccatgctgatcctaatgacttgcttctcagaggaatttaatcaatctgagtatcttggcaagatgactgcatgattgtagagtggtgcgggtgcaatttgcgctccttttcacgggagagatctgcgcggcgatatcttcagaggggttccccttctcttggccaaatgcaccgttccacaaagacctcgttcgccaagctcttcagaccgggagatcatcaccaaaagaaaaaaagacgcatagggcgttgttgctgtgtagcgaatcaacacgtactgtagtgtttgtacaacagttgtaccttgtgtaaagccacctgggcagtgctaaaggtaggtaagtcaagacttgctgtagccttgtgggggctttcgccgggctgagtcagccgtgtagttccctcacgggccggaattcctctaagactccgaagtgcatcgccaatttccaccccccgtcatctcccacactcatccacccctgctgcttggaagacgccgctttgaactctcaactatcgtctctcactcttaccaacttcaatcacgcttatcatggctctcacagaaccaaccaatcccgagttcccttgctcactgtaagccctacccccaccccgaaataggtcccaagcacaagacccgaatagaccaagaaatgctcaactcttgattcagcacaatctccctcccttttccgaccaatcgccttgcatcgtgcgctctacgcgccttggaagttgatgccgaactatcccctcttgtgcgacggactttgaccctcgtggctccggcggtcgaagccccatccgagccgcaagaaaaaaggcagaagcaagaccccgacgagtctacaaccgtgttgaagataacatacatcgcgacgaccaaccggatgctgcgcgtttctgtcaatggatttatggagagtctaggtgtcgtacttggggttatggcagaattggatgttgatgtgctcaaggctgagatggagggctgaatggtggatttgccctgcagcaacctgcaccattggtccctccgtcttggcctcaacgtatctggtataatcctatcgggagggtgtgtctgaaacccagaggcgcttggctgccacaaggattggggattatgcacagcgggtcgtacgtcaacccctccatcagaacaacccgtggtgacactagtcctgtccgcggatagagctgggggaaaaaggagttgccgccaagcaaccagccaacgctcatcccaccgggtcatccttggcatcctaggcatgcatcggagactaagttagtatgaagtcggcttggtctgcggcccgtctaacagaaaaaggttatgcacggcatgtgattgtggctgtacttatctcgcttcgagttctgcaggttccatagatttccacggagcttcggagtttttcacggcctcttggctccgtcttagggtgcatcaagttgggtgagatgatgcacttgaccaggtgaggggtggaaggaaacgttggcagatctcatagtttattcatccgtccttcaatgcatcgccggaggaaaagaaaatgcccttctcagttgtgatttattttgaagattccctgtgtctctttgcctctttatccgcctcatttctctctccttgtagtcaagaacatccaacatggaccctgaaaaaggtgcaatcggtggacttccaacgtccctgagggccgaacttgagccacagcatgctgacctcctacttttcgcttgttgtttaatatcgggacttgtggatagcacgatatacagaggtacggacaagctcaactcccgcctactcaactgcggcatatctaacatacgtagcctacaacactttcgtttctatgcaaacaggtaagattacaacctcaccaatacacaatcccacccacggtcgactaatcacagtggtgtgtaggaaacaccatcttcgtcggactgggtacatcacaccaaaacctccgtcgatatggctgggcacgttcgctcacgtccatcggatgtttcaccctaggatccttcctttttgcacaattacaccgcgtcctgggtactcgccgacgagggtcgttgatgctgtctttcctgttacaggccagtataatcctgttaacggcaggactcgttcaagggggtgtcatttctagtacactagtcagcaagggatcgcagaaaacacccccgtgggaccagatagtcccaattgttcttcttagtctccagtctgcgggtcagatcgtagcgagtcgtgccttgggattcaatgagatcccgaccgtggtgattaccagtcttctctgcgatctaatgtcggacccccagctatttcttgtgaggaatgtcaaacgcgaccggcgaataattgcttttgtgctaacgcttgtgggcgccatcatcggcggatgggtcaccaaggtcactgaggcgatctctcccattctctggctatgcgcaggtatcaagggcttgctcgccttagcctgggctttttggagagctaagtagaatacatcgtcgtgagtttctccgttcagtcttgggctatcaaaggcagatttggcacagtcaccgggaatgttggtattatactattcaacagattaaccggatatacgccgtttatttccgtcccctacgctcgctactccgttgctatattcgaaagaggcagatacataggatgggtccggtcggattggagagcaatgctatgatgaacgttttctttgaaggattatctacggagaatgtccattttctgcttgaaaagtctgcaactttatgccctcccttgtcacattttacagctaggagatgaaacccccagaattgcacacaagaggagcgccttacaggtggccttccgttcttgtttatgtatgagaactatcgtcgattccgatgatctccgtcagaatatcactccagataatccaatatcccccctcatctgacaaacaaattggtccccatacctcgggaattgcaagcttaggggccagagacagttccgcgcgacggaatgttccgaggacctcagatacaacgtctggcatataaagaaccgtcaatctgacataattttatttcttctctaacaatcaaaatgtcttctaaattgactgtcacgggggtccaaggccgccaaattacaagtaagtccctcttagccatacatccaaccggtgctaacactcccagttccgaccggactattcattcacaatgaatttgttccctcatctacgggtcaaacgctagctgtggagaacccctcaactggcgatcaacttggaacaatttccgccgcgggcccggaggatatcaacaaggctgtggaatcggccaagtcggctttcaaatcatggagaacagttcccggacctgccaaagcccagctgttgctcaaacttgcagagctgcttgagcgcgatgcgcaagatctagcatcattggaggccgttgacgcaggcgtcctgtataccgattcgatcggcatgaacatccctcaggcggtcggctgtctgcgatactatgcgggctgggctggcaagatcgatggcaagacacttgacatggaaggtggcattgcctatacccatcgtgagcctttgggtgtctgtggtgcgattgtaccttggaatgctccgctgtaagctttccactcccagccaacctgaacccctaaagacatctaacatgctctcaggatgatcactatttggaagctggctcctgctctagtcactggtaacgttttgatcatcaagtcttccgagctttcgccactgtacgcccagaggcttgcggagctggtgaaggaggccggcattcctcctggtgttgtgaatatcgttaccggcgagggcgccagtgcaggccaagctctgtctgaacatatggatgtacgcaagattgcgttcactggtagtgcgcttgcagggcgcaagatcttgcaagcagcatcgcgaaccaacctaaagaaggtcagcctggaactcggcggcaaaggcccgtctattgtctttgatgactgcgatattgaaaatgcacttctctggactcgccttggaatcacagccaacaatgggcaaatatgtgcagctgggtcacgtatctacgttcaggcctctatttatgatcgatttgtggaggcttacaagaaggccgccgctgctgctccgacagtcgccggtaatccattggatatttctacaacaaagggaccggtggttagtcgggtgcagcacgagaagattcttgaattcattcgtcaaggaaagcaatctggagccaggcttctctttggtggtgagcggatcggtgagaagggatatttcgtcgaaaacactgcttttgcggatgttggtgacgatgcgacgatcatgcgagaggaaatcttcggtcccgttgcggtaagcaagcttgcatacaagactctatggcatatactaatccgggcacaaattacagagtattgccaagtttaccacggaggaggaagtcatcttcaaagccaatgactctcaccatggcctcagcgctgccatctttaccaacgatgttaaccgcgctcatcgcgtgtctaagggactggagtcaggtcaagtaactgtcaatgcttgggcgatgctcagtcccaatgttccatttgggggcgtgaaggaaagtggattcggacgtgatatgggcgaggaggctctcgagggttggactactgtgaaggctatcaagtatcacattcttccccgactttgagtattatgtgtgactaaataggtttcttatctctcaatttgttgtgaattgcttttctcgattttcccggttctaaatagaactgtacatacttggaatttagcacattccaaggttctgggcagccctatctcttttcatcctttttctaggagagaagaaagaccgaaaatgaaacacagattgctcgaagagaagtttcagaacccatccaaagaaaaaaggtcaaccaatagccactttagttcaagtgctcgctcatcctattcctgcttgctaacggatgcgcccgttggaatcggttgcatattgtggaaaacgttctttgggtcgtacttcgccttcacctcctgcagtctctggaggttctcgccgtagatattgcttacgacagagtcaccagctgggtacaacgttagtatctattgaggtccgaatatgtttgggtcaatccgactcacgttctgcgtagttgatgtactgaggcacgctcgaatcaacagcttggtctttggttctggtatccaattgagctttccacttggactggacttctcgtgcccaagcgcggtgctccagatctttggatgggtcggtccatctcaagtagatgatcccattctgagtatgatttcggcttgccagcgcggttgcagtcagaggcacttcgcaaatcttgcgcatgtcagtatactcaagaatgacggcagacgccttgagatctggttcactctggatcttggtcatgaaatcattgaagattaccctgacaaagtgaggatccaatggcggctcatagaaaatacccttgaaagactttcgatcaccgtaggtcgcttgcgggttctgtagggtgttcaccatagagtacgggatcatatcaagggtattcaggactggctcaagggccgtgaagctggcgaatttcttttggccttcttcgcgtggaccattatagaagccaatgacgatgatcatgggcccagatccatctggtgccagggcgaaaatggacatcgcaccgaagcgagagtcaggttttgccagggattcgttcagtgcatccgtaactccttccagcttgtcgggggtaaatgcaaggataccagagtacacgggatctttctggtcgtaggcctggtaggtgaagtctgccacgacgccaaagttgtagcctgcacctcgcaagccccagaacaggtcgatgttctcggtggcagaggtcgtgacaatacgaccgtcggctaaaacgacggtcgctgacaggagattgtcaatagtgaggccgtactctccgctcagccagccatagccaccccctagggtgagtcctccaacgccggtgtggttcacggtaccccctacggccgccaagccgtgggctgcaccggcttcgtcgacttccttccaggttgctccaccctgagtggtgatagtcttctgcgcggtattaaccgtcacttggttcatgcgcgacagatcaatgaccatgccgccatcgcttgagcttgtacccgcggttgaatgacctccacctttcacagcaaggtcgatactatactcttgtgcccacaacagcgcgatcgagatgtccgacgcatcaataggttggactacgacgccctgcaatttatcagttggtcattttgtcattttgtcatgtttcgtgttcttccataccgcatatttcattccagtgtccgaccagcggactataacatctttgtaactctctgattcaggtgtgtagacagtcgcggctcttaggcggctccggagagcttcgatagctgtatcattgatcccaggcatggttgggagcggaagaattggtcggcaagaatttaccccgcgaacttgtgggtatttccctatttccctcggagtaacacctggagtagcacttgtctgacacgaaagcgaggattaacctgaacttcgtaaaaatttgacactgctttcaaaatagttggtactttgtactttgctttcaatctgctcccaaatatatgtcgctgttgtggttcacacgtctcggccgttgtttgccgtggttgtttgccgaatatatatttaagccaagtgactcctggagattttcttgagaataacacagagctttatgtatgggatgaattggattcttgcaagggtgatactgggtagaatcagaaacagattgtaaagctgtctatttcctcatgcttggaatagaatcccatatttatggacttcgcccctacccctgtaaataatgcctcatttctttgaattggcaatggagtcagaaaaagccaatgacaatgctaaatcctattgactgaaagcagtctggactgaaatattgggatacagctcgatgtaatttgtatgtaaaaggcataagtgatgtcaaactgcatcggcagtgttgatcttgcttccgtgggtggtccaaatccttggccgaaatgccgagtcgatgtagggtccacttagctgaatcccgatcccatattgattacgaattaactgggattctcaacatttctttcctaccctattttaggacctgctgagaatactttgcgtacaactcgggataccaccgctggcccacatctggatggcttaggatgcgatttctcaagtgagcctcgccgaactgcaattcgttagtcccatgcatggaaatctcaaactagaacaactcacgcaagaatataaaggagaaaggaattcactcggcacatcaactgcccgtttcttcttgtcgtccgaggccggaatacgctgcacgatgtgagcagcggattccttgagctgatctagcgccaagtctagtctcacgctctggaagaacgggatactataacgcgtttgagatgtaggcgcctaggggtagcaagctgttagaaagctcgcccagtaatgaatggtatggtaaacatacgataactcggtgcgttgtggccgcgcaaatccctccagtgatggcttcgaatccttgttggatatttacgacaagactcccctcaatgggaggcacgtcaatccattctcccttcttattgagtacctgtagtcctcctgtgttgtcttgggacaggaaggtaaagagacccgccgagtccttgtgagggccgacaccctgggagttttgcgctgcaggtgggtatttcacaaacttcagccggctcatattacccttgaagccatcaaatgtctcccgcgggagggacaagcattctgcgacgaggcgtacgaatgcttgcgccaggctatcagtctccgtcatatattcttcaaccaggtcttgagtcccagggcaatctggatactgctcagggttagtggttgggacgcacgtctaagggtgtgacttacctgattaggcccttcaagccgttgccatattgggtcctgctctgtccatggtttcacgccaggggtgccaaagtcaaattgctagagccgggaaattagaaccgtgacaggtccgaaaacgaaaacgaaataagcccacctcgcggatatctgtttttgtcgcagtggtctcggcaccgaggcgggtatagccaagaaaagatggcgagttgatcatattgcatttctccttggcctctgtcgacagggcaaataacttgggtagattttcatgcgtatgatgaatcaggctctgtctcaagtttagctcagcatatttcatttgctcgcattgtttgtcatgcgcacctctaatcctgtgttggtcaaatacaggaacccaacgacgaagatagcttcacgcaacttcgagagctcctcatttttcgtcacggggtcattgagccgagcgaaatcgacgatcggcacggatgaaaatgtctctgtcattccgcctattgcgattaagtgaagtgttttttgtgattggaatttgcatccccgcagattcacaggtaattatgcggggccccggggtggaacagggattactcagccacgagactccaagtgacctcgggatgaacttgtatgggaaataccccgtagacttcaaggcccaacttggatttgcacaacgagtcgaagatctgaagatcccgagatcgaggttgtcaaaagacttgattaactaatgcgatcacgccatttatccctgtattgtcgaaccgcaccgtcaacatgcatagaaaacattatacagagccccctattgccaacactgaactcccataggaggataaagactcacgttctaaaattggtcgattgatggaaatatagcctcccccttgacgcttctgaatgccaagatcgaggttttctcctgaaaccatggagcccttggcaagaacccaccgctgacgtttcagatcatttgtggaagttcttccggcgaagtggtcctgtgagtaaatgaagaaccatttcgtcgcctgattattttccatccaaacgacgtccatccattaaggtgtgcacgggtgtccggtccgtgaccctaaagggcttaagcccgttctagactggggacttatatcaatctatgccaagctttgtgtttcagaggaaacatggctgtcacaaagcaggcccctaggctggcaatctgatacgtgactcgtcggagaattaatgccatcacgtccatctcggtaaatcttcggttcggcttggccggaagagattatccagcacggaaattctccaaaggtcaggaggatggtggatgcagcttgtctcaggagctcctatggcctggcgaagctcctgagtggtatataaaccccttcggtcgaccgtgacatactcatgttttaaatcaacactctcacactccgccaaagcaacttcgagactcagtccactctttcattccttcgagatctctttctgtacccacgatggctcctttcaacttgatggcagtttctctgctcggctgcttgtctagccttgcactgggagctcctactgcaaccaccaacttcggaaagcgcgcaagcgtcgatgatgtgagtatcaatgcgcgaattgttcaagcaccttctggtcaacatcctaacgtggctctgatttaggtcgctactggttatgccagcgagaatggaggcaccaacggtggtgctggtggcactactaccactgtctcctcgtatgctgccttcacttctgcggtcagcggcaatgatgccaaggttgtctttgttgacggccccatcgagaagtcggccaagcaagtccgtgttggaagcaacactagcatcattggcaaggactcgaaagccatcctgaacggcttcggcctgtatgttgccattcccagcatcgatttgagatgatactaaaccattatagtatggtcaaggaacagaccaatgtcatcatccgcaaccttggtgtccacaaggtggtcgccgacaacggcgacgccattgctgttcgtgagtacaacctactaaaagatatctgtctaggaaacagatgaaaggctgactgagcttagaaaaatccaccaatgtctggattgaccactgcgatgtcgcctctgaccgcgatcacgacaaggactactatgatggactcatcgatgtaagttcagatcacaggatgccggattaggacaaaccacagatgctgatatgaacaagcttacccacgctgccgacttcgtcactgtgtccaacaccttcatccacgaccactggaaggcctccctgatcggtcactcggacagcaacagcgatgaggacaccggtcacttgcgcgtcacccagaacaacaactactggtacaacatcaactcgcgtggtccttccttccgcttcggtactggccacatctacaacaactactacctggacgtctccgacggcatcaacacccgccaaggcgcccagcttcttgttgagtccaacaccttcgttaacagcaagaagcccctctactctaccgactctggctatgctgtggccaaggacaacgacttcggcggcgctgagaacactgctgaggctggaaccctgaaatcggttccctacgactacaagctgcttggctcggccaacgtcgaggctgctgtggttggtactgctggtcagaccctcgtcttctaagtgaaatagtgagaaattatgtagcaatccgggaatcgctgtccgagaagcgcaatttgtgtctattttgtttgaatctgttgcaatttagtccttagcaaaatctaccttgtttgcttgcattgatatccaacagataccttagtacataatatcatagggctcgagttctactattgtatagcaaagcaactcatcaatcaaattcagggagtgagtagagaaaggaatggacttgtttacttggtggtcatgcgctgcaacaggtacgctatccagagtaggataagctggccccacccccggggccgtctggttgtatggacatatcttgtctccttctcagttcttggctagacagcagaaaaggaccaaaacggcttaatttgtgaatgcaatttttctatgtataatctagatatatgtctgaggatctaattaccgggtacccataagataaaatgactcacgctccagtccatgcaggccaatccaaactccgccacagtcctgtaaaatgctattccttcagaaagtacggtccctcaggaatgaattcaatgaaaccaagtcttcgctgggcgctggagtgggaagggcaatcttagttgcgtcaaactcccatgcggcctcacgcgcgtgctcgttcgatttgagatggaaagacatcatccactctttcactctgccctccaagaatcccatctcacggtttcgctcccacatacgacgggactctttaaatgcatggttgattatatcgcgacgaagattctcgtatgcgtcaaaagcctccgtcaggggctccgagcgatagctagctagaattcgagagaacaagattgcgtcgtccagtgcgtatgcagccgactcatcacgcgggggcatctaattatcttgttagaatgtaacaaacagggttagtcttttcatggtcggacataccgcgtgtgctgcatcgcccagcaaaataactcggttcaaacaccaacgccctccggggcgaacttgatatacgggataaagcatccagtccgctttactctcaataatttctttgacacatggaatcgcacatttcccaaatcggtctctgatctctccgcggagggcgcagcgaattctgttctgggtggcccaatcctgaccaggctctagtcgatagctgctgagggcttccggactgaattgcacgatagcagcagcgaagatctgttcgcaatcacggtcacagtagctcgccagcattgagccatgtcgtgagatattgagcgatgatgtgcggaagtgagcgggtgatgaaagtgaatccgagtcgatcgtggcctgcaaaaatgacaaccccgtgtactcagcaggccggccgatatccacaaacttggtgcggaccgccgagtggacgccatcgcagccgataatcaagtccgccactgcttgtgtgccatcctggaaagtcacggcggctctatcgtcgaattcctccccaccgatcactttcttgccgaagacaacctccacattccgagtccgctccgccacagtcaacatggctaccgacagagaaatccgcatgactcttcgacccttgtatccgccaaatccctttcccttattatctgtgaagctgatggagccgattgcgcggcccgaacgcatggagaaaagctcaatggcgtcaacatcggcaccgccctcgggacccatccggtccaactcatctaacacgcctagctgggcgagatgtcgttgggcgacgggggtcagattaatagcaccgccggaagtcgatagcacatcgtgtcgttcgtagacagtaattttcaggttcggtacgaagggagaaagctcccgggacatggccaatgcacaagcgatgccagcgatgccagcaccgacgatggcgatattctgtggggggtgaattggtgccattgggtggaccgagtaactcgaggttgtcaagatttcagtgaagagaagtgccgtgaaggaaattcgcttggcatgagcttaatatcgcagaatttttccaactgacgattccgctctctcatccagtattaatatatactgtgcacctaaaaaaactaacgggcagcctagaagcctctagagattcggccggggcaggagatccttcggcatgtcaatccgtgggctccgtggtggagtctcacacaaccatggttaccacagatttaagtgtatacctaggtacctcacatcggaggtagcttattgaaatgaagtatggaagtatctacctaggtaggtaaggggtggcgagtggcgtcaagtctgggggaatatgagaaggtccgtgggatgttatacaaagaaaatatgagttcagaattgattgcggaaggagctcgggggaagctaagaacggaaggatcccgttggaccggagaaattgacagcaccgtttgtccctttgtcttactttcttcctcagattgaccattttgggactggacgatcgctagaagaccagtagaagaccactccaagtccttatatccacttttgactggattagctccagttatctagattcgcaacgtccagtgcccagttccacttccatggcgttccaactttttccttacgagtctggggttaagtcgtgtgctcttttgatctttgttactagtatatagtacctaggtacctcggcaaggatttcaatggccccatcgaacgttctttgcatatattccaggaatattctaaggttattggccccccttttggtgcttttgttgcgctaaacttaaaagaatctggcttgtcacaaaaattctatgtttttatgttcattcttttttaaccgagatacaccttctaaccccaaacactggtgaattctgggcaatatcaaacgcggctcattctccagttcttatttcggaactccaccagaagacgtctgcttctgaggccgttgaggcacagacgattttaaattccagaaggcggtgaacgaacacagcccacatatccccgctgggcccgttagtgttgggacatgaagaaacacgacagggggggttttacgaacccagtacacaattcattccataatatccgattttttccgtgccatagcccgagataatcggcccaacaaacatccctagtgtccagctgatactagaaaccgatatcgctcttgagtacccgccattcgggccaaagattccaggattctctccttcgatctcatcaacagcttctgcaaaattgttatgatcactggccaatgagactaatccaaaaaaaggagaaaaagaaaaacttacgagtggcttccatcatacccaccccgttgagcaagcatatcacaaccccgatacacgtgacagatacgctgtatataatcgaaccaatcttttctccataagcccagggaaaccgttcgtccccaggaacgccaatcagccacattaaaggtaccagaagggcaaacccgaccgtggtcgggtatcgggtccccacccgatccttcagccagcccacaggaacactaaggagcaccgcggggccttggaaggcagcaaataacaaaccagcggggagacttccccaatggaaggcatcgcgcacatggaggggaagggtagtgtcgaagctggcagttagaacggcatagcagaaataactgacaacaccaccaacgaagcgaccgttgccacacaagcatagatagaattgtatacccgtcttttccgatacagcctgagtgcttacctgtggttctggatcagtcgatggtggcaaaagtgcctccctctctggatcctgcccgtccggttccgcgcgaacaggtacgctggcttcccgcgaccgctctagcattagacatcgcagaatgacatcaaacacaataacgaaaagaacactcgaccatgccacccaatacccgcctatgtcgaacagaatgccagccacgagcggtccgcccgatgtacctacgccaatggcaacagtcacgaaaccatacattttacccagctcatcggcaggcacgttgtccgccagagtagcgaatcctaccacccaaagaacagtgctggcagcagactgtataaggcgaccggcaaagagggtgaacactgcactaacattaatcgtcttgctgggaatatcacatccgcggatagccgccacttacatgaagtcgccacggcgagtatcaaagaacccaccaatgcccccgcaagtccgaataacagccaggcacgtttcgcgcccgagcgatcggcgtgagacccgatcaggagacttgccacgaccatgatgagcgcggtctgggatagcagcgctgtgcttatgcgctgggtgagcgagacatcgaggcccagtcgatgctccagcacgaacggaagaatcggaaccagaaatccgtacagatacatatctattgcctgggtcaagatatgcccttttctttgctaaatttgtgaatagcctaccggtcagcatggccactgccattgccgcgacaatgaaataggtggatgatcgccatcgaacaccccatggctcttgttggtttgatgaggctctcatagtgtttatgggtccacgggttgtttcgcagcttaatgatcggttcggtggaaagaggggggctgttcttggattttacacagaccaactaccccgggccccctcccggtctagccctggaaagtagatcaattcgcttattaatgtctaaattgagatgcattaccccctgtggaaggattttagacgattctacgtgactcatcacgcaattctgacatgttccggctaagcacccggtggtggatgcgccatccctggcttgtcaaaatctgtcggcagagcaagggcttgcattagccacggctggaccatcggatagatcagccacaaagggaaaaaatcggtcaaacgcaatacgtttgcaaacgctgctaatcaaacagaatagtctagatatcgactatctcgagtgtatatcgctgtcgatatgcaccatcgagtactccgtagagatcatcgcgttactagctggtcagtcgccgacgcggcacgtgctattacacttgaaagccacgtatctaccggaaacggtttttaggatgtcaaataaattctatcatgcttgattgcgttaaaatattcgttggctcgtgatacattgcatcatatcacttaaaacacatgttcgacgtttgccgagatcacattcccttgccgcagtccgcatcgcaaaaggtgtagaagaaaagaggtgtatacaaaagcaagatggcaataaatcgtttcacatcaatgtttcctgatggcaagccagcgtccactcgccatccgacccttggctccaagtcgtcgagcccgaggcagtgtattctttcttcccgcgtacagcgcggaccttgtatgtgacgacgcctgccatcaagtcgacgatgatgacccgtacctcctcgaactgataggcgtcgaatcggtgaaatggtggccggacggccttcttgaaagcgtcctcgtcttcgagtgtgatgatgggcatctgagggaataggaaacaagcttcgggattgctgagtttccagatagctggtgcgggatcagcagatgtgagagcagtccagagtgcgcgctctttgttgaggaggtcctcgcggatacgttcgtgcattgaaggcatggttggtatgtagttgttggttttgctggatttggctgatgaggatatcgaggaaacacgctggttgaactgttttgcgatgcggatgcgaaagagacggtatcctaggacgaattttgtaggtacgacaaaagtaataatcaacaatgatcttgcgcgtccctggccttgattttattgtttcgccgtctggtacctatattaaaatgacgtcagatgacgttgagaaccaagcaatttaatatctggggatcaacatgtcatataagatgcagagtacctacaacataaatagatatgcttgacatgcgtcatactccacgttcaacatcacacggtggctgaaaagctctggcatcactgggcctggtgcatccacgatttgacctctccgcgtgcatccacggaaatgtagtttcgactttgctgggttgatgctcatcaccaatatgatgagattacttgttgtattctttttgtttggggcaacctttgcgccgatacttggatacggccacgttgcacatgtacctgtaccatattttccgatttgagttgccttgataaaggcgcttagactacaccacaacgctaactacggtaaatcggctgccgataatggctgcctttgacgccggtttaagctccctacccaacgtatttcgcaagcgagtggtgtgaaagatatgcccgggcgcatattctacgactcggccaaaagacccgtgatggagatttgcgtcgttctgtcggggaacccacccaccttgacctcttggcgaacaagcttcttctgacatcgcgactgcttttaaaaagctatccgctaaccgtgataacagggattcgagagcactacaagtgaagactgccctctatgtcaacagatataagcccaaagtgagatcgacctaattcatcgtctatggctatagggatgtgacgcgcccttgagttattggtgtcggcgttcacggtggttaggggttgtcaccacagataccacaaccgcggattctcttggtttcatttatggaatgtgacttgaagatcgtaattcttggacccatcgacaaggatcttgcattgatctaccataccacagactcttgtcaaccttgacacgccagtgggaagcgactccgcacatactagataagagacgatgccttgcggctcaaacgagctagcaactgatgattcggaaagccaaagcgggtttagcccttgtcaaattgggccctcatgccatggaggacgcatgctaaccccatttagttaactttaaagggtaagagaagaatcgttggcacacatgggatcttttttggccccatcttgacgcctagggaccgttccctcacgtgagaagcaatgatcttcatgttgcgtgtcttgtccatataagcgaggtgccgcgtgggggctatgtatgaacagcctcatttcccctgttattttttaaaaggggttgaactggggtactttgcttactctggtctctttcatagtaattcatgtattttaattttccggcagcttcaaatcgagcatattaaggcatcggcccggcgaaatcagccatccgatatttggcagctaactacgccccttcgcacctagcaaccctgccaaactaagcggtaaaaagcagaatcttcaaccgtaacatgtagtataataataccccgcactaaatataccaaaaaggtccataccgccttgcgaatatcagcccacgtgaggtgaggctcctatgagctgcttaaggggcgactcagttaataacattcgcgtcttattcccatgaagcatctttctctgccttgcatctttctcagattgcacgtgccgtttgcatcatgcaggacccatcgaaagagtaacctttcccacaaattctttgcactgtgggcacgttcagaaagagctaacatatagtatacagttctactatcgatgacgaatgtcatgatgcgatccaaaaattctttgaagacctttctgccgacgaaactgctttattcgaggctacgacccgatcgcaacagctgattgatgaccttcaaaatatcgacaacaaacaaaagggcaaaatttcgagaaaagtcgccccaaaacttaaagccttcattgcgggtgttgagcagtatggtggggctttggatgttgtcgcaggttcagtctcgatgatgagtcctatttgggcatcggtgcgagttgttctcaaggtaagtcttgtgcctgtgttttgttttgcttttcgtccaagaactctatggagattcacaaacagaatcctgatgtggacagatcgcgggcgagtatagcgaatattttgacaagatctcggacatgttcgaggaaattggatacattctttcctgtctccgtaggtatccacgtctgtacggggataaccaagtccttcgtgattcgatggtagaggttttccagtcaatcatgcagttctgttcccgagctcgagatctctttcaccaaggaaggaaataccagagtggcgtgcgagcgctgactccagtcggcctacacgcgggctggaaactcatctggaagccatacaagattcaattcggtgatataatcgaaagtatcagatcctctatggtcagaatagaccatgaagccgatgttgcggaaaaagagcttgccagtaaagagcgttcgaaggccgagaatgaacgccagttgcagacatctcgctgggttgctctagaatcgcatcaaaaatccgtcgctcgtttcatcgaccagcaacgaattgactacgtgaatcagtggctttcacccgtcaacgcagcttccaaccatacctcggctaccaaattgcgccaccagggaactggacactggttcttagatggtccgaaattccaggagtgggcgttcacggacaattccttcttgtggctgcatgcgattcccggcgcggggaaaacaatcttggcctctactgttatcgaatggttacgtgataagaaacagagtagcgacgttgcggtggcctacttttactgtgattacaaggacaagcaaaaacaatcgccgacccggatcatcagcaccttactttcaatgctcgcatcaaggaatgatgatgtcttcgaaagaatgcaggcctttttccaacagcagtacaaagagaacccggcatatgcaccggactttgacgagcttttgaacaacttcagtcactttatgggtgatagcttccagcaaatctttattgtggttgacgctttggatgaaagcgaagacagagaatgtgtggcatactctctgaagaaaatatacgagacctgccaattctcaaatatctttgtcactagtcgtcacgagatcgacattgcccggacttacgatgggctgccgagcataaccattgcggcgacagatgttgccggggatattgatctatatgtgaaggccgaggtggcggcgaaaatcaaggcccgaaagttgaaacttagggacccaaacctggcggatataatttgtgatacactcatcgcaggagcgcagggtatgttccaatgggtaaaatgccagattgaccagctgtgcaaactccgcaacgataaggccgtgcgcaatgccctaaatgatcttccgaagacattgcacgatacatacatccgcatactacggaaagtggagtctaacaattccgaagacgttgaaatggtgcagcgactgctgaaatggttggttcttggagttcgaaatctcactctgggcgagttggccgagtgtgtgagcgttgatatcgacaatcctgaggactccttcgactttgatgcggtctttactgacgccgaagatgttgtcgagctttgtggaagtctgattaccctttcgtctgatggttatgtggccttggcccattacacagtgaaagagtttcttgtgtcagactttatcagggataccatgccagagttctggattgggtatagcgatgctcatgccgaactggcgagtgtctgcttgacctatttgacctacgatgacttctcaggaactgaagaaaggtccggaaaagctttattgcaaactttcgatcagtacaagtttcttccatatgccgtggaagcatggggcacccacgcgcaccttagcgacgttagaaacgatgtctttgatctgaccatgagactatttaattcagctgccgactccgagggcacctaccacacgtggcgtcatatattcttccatctgcaaaggtccagtggccagcggctgaggccctcgaataattcccctctttactatgcaagcttcttcggcttacaccgggccgtctcagctttgctggatggcaacgctcacgtccacatagaagaacccatgaaagcgagtgcaagtgctggacacgagtcggtgatcaaagtcttccttgaccagtttgaatcgttagacagagttgtgactgaaaaatgcctttacgtagccgccggccagggacatgagtccgtggttaggctgctactagatagaggggcgaatgccaatactcgatccggaagaaatggcacccctctccagatcgctaccctgaatggtcgccatcaggttgtttcacttcttcttgccaacggggcggacctgaacgttacctgccagcggtatggtgttcctcttgcagccgccgctgagaagggacactttcaaacatttcaaactctcctcgaccatggcgcgaacgtgaatggtcgtggtggctggtacgcgtatcctctggtgtccgcaattgttggaaggaacattcagatgatcgatgccctcattcagcggggagccaatataaacgctttgggtggtcgacacggatgcgcattgatggcagcctcgtatatggggatgttagacctgattcgctcactggtttccaacggtgccagggtcaatgacgaaaacgacaaggggactgacagtctatatgcggcgtgcatggcgggcaatctagactctgtgaagcttctcctggagctcggggcagatgtcaatgccaaaggaggaaagcatcgaaatgcacttaacgcagcgagtgcgggggatcacaccaagatcgttcaatgtctcctcgatgccggtgcggatgtcgaattcttcgacgagcactatggaaatagtgtgcagacggctgcgtctgccggacacgcagacgtactacgtctactggtggaggcgggagtggatgtcaatgcgactaccgcagatcgaggaacggcgctcgtttcggccgctcaaaacggccacacggagattgttcggctactgtttgagttgggagttccaaccggggctacctacgagatgagcaacgccatcatggtggccgcaaacaaaggacacatggaagttgtcaagctcctaattgaaatgggtgcagttacagacgattgcagcaccctttcagcatatccctgctgcacgcccttggaagtagcagccgtgaaggggaacctggatatggttcgtctgctacttgatctgggtgccgatgtaagcttcacgaacgataagaagtatgggacccccctaattgcagcttgtcgtggcaaaagatcaagtattctcgttgcagagttattgcttgaatccggggcagacatcaatgcctcagcggacgctgatgacatgatcttctgcgcacttggagctgccttggaatccgagaactatgacctttgtgttgttctcctcgaccgaggtgcggacgtgaatgcccttaatgattgctaccctacacctcttatgatggcagtcgtgctggaggatgacagatttatgaatttgcttttcgatcacggcgcagacgtcaatcttgccattgagccttatgaagatgaggacgacgatgaagatgaggatactcgtggcgatttcatcacagcactgcagtgtgcggtagaggagggatccgatgagagggttcagaacttgcttcaaagaggcgcccatctttcagtggcaattgaagacgcaatgttctgctctgcgctacaagctgcatcatttgtgggggatgtggataaaattcggattttaatcgatgcggggagtgatgttaatcaggtcggtggcttgtatggcacatgtctacaggccgcggcatcccaaggaaaccaggacgcggtagagatgttgattgaggctggtggtgatatccatgcgtgtgaagatggcaaatatggcagtgcattgatggcagcgattgaaggtggctacgacgaaattatccagctactagtcaaccgaggagttgacgtcaattgccctgttggaccgccgcccctcgagtacccgctcacggcagctgcctgtcatgatcgggacagcactgtccgtattctgcttgatgctggctccaacgtgaataataaagggggtatgtacggcactgctctacaagcagcggctgctgaaggccatgaggaaatcattcgcctattgcttgagtatggtgcagaccctaatattgtcggtggcaagtttggcaccgcgctacaggctgcctatgcaagtggatattaccttgtcatatctgatcttctgaacgctggcgcattggttcaccttgaaggcggacagtatggaacggctttgggcgcggcccttgagaattcttgcccaacgttggtttcgggtctccttcggtatcatggtgctgatccaaatgctccagttcgaaagtatgggacaccacttcaacaatgcgtaaggtggagagtgtatgattctgcgttcgatgctttgcttgatatgggggcggatgtgaatgctcaaggaggcatttgtgggaatgcgctcatatgcgcgatcttacatgaagaggttatggtttcggcgttgttggatgccggtgtcgatgtcaacctgaaaggaaacgcggcatatcctaccgcagttcatgcagcagccaagatgggacggttgtcgattcttcggcgcttggtcgaaaagggggctgacctaaaaaattcaaatggagtatctgggtcacctgtggaatacgcttcatccacgggcgataatttctcggtattctcgtacctactcaagcgaggagcagccatcgagcccactgggaaaggaaagtaccacaatgccctgcaggccgctagtcttactggaaacaagaccatcgtcaaggctcttcttcttcgcgggtttgacatcaacacgaccggtggaaggtttggcacggcattgacagctgctattgtatcagacaatcttgatattgcaaggttccttctgaagaaaggaattgatccaaatgctccgggtggcatgtattctggtgcattacaggcggcagctgccagcggatccactggtggcgttcgcctcctactcagatatggtgccgatatccacaaaaccggtgggaaatatttcacggttttacaggcggctgccgtctctggaaattatggagtacttagacttcttcttgaaatgggcgccgaggtgaatacttttggtggacactgtcactctgccctgcatgcagccgcgttgtatgaccgagccatatcctgtgagctgctgatgaagaatggggcacactggagcttagtggaccgcaagtctagtcatctggctgagtggagacttgataatgcttgcgagattctacaagactgccgggagcgacaagagcgcggttggccgaaggaagattcggagagtgggtggtcagatgttgaaggcgatgaaatcgataaagatgaggatgatgacgatagtgatgaggaggaagagggggagggggaggaagaagacgaggggcaggaaacagaagatgacgatgatgacgatagtgacgatggtgacgatgatgacgatgatgagtataatgcatggaaggcaaatgtggagggaattcctatgctcgacatccctcatcgtcccgttgcgaatgcgtagaggttgtacaactggagaggggaatgaatatttatatagagaatgaacctgtcatcatgatagaccttgcattatacttccctacaacaagcgaaaattgtagctcgtcctgctatcggaagttatgctaaattatcaatatgatgtccacttttgctagtggcaggttattgttaaaacttttgaatctacctaggtaggtcatatacctcgtaaccttgtacccatacacgtttcgtcgagtagagactgtgttcgtccaattttcacatcaagtgcccgggtggtctagtggtatgattcgcgcttagtaagacttcctaattgcatcaaatctctaccttacaaatttactaacaaactgttcaggggttcacccaaagcaatattgcgcgaggtccccggttcaatcccgggctcgggcccttctttttttttttttctcctttcccctttctttctttttttgcttccttttgattatactaactaactaatcaatattctcttaatctattccagcgttgcccttaagacagtctatcaacataaattgggcattcactccacggacagggatattgatatgcgagcaaaatcatattgtgctcgagtttcataacattttccgctttttccgagctatccctattttccctattccgggataaagattgcatccgcagtcgcgctacccactcactgcatattgatgtcagattcaatgatatggactatatggttgaatccgagaccaatatctaagatagtgcactctcttccaatgtcttgcacaaataccgaagtggacccaccggcaagctccgatgcttagcagcaaccgtctgggaaagaattgtgaaaatcccaccacgttggacccacgtacgagtgcaaaaggccagtcaaaagccaggtaccaatctcttgtgttccccacacatatctagcacgaatgatattctaccaaagtggtcgataggaggaactccgatggtttttggccggattgctccatgttgtggcgctgatcttgccctaatcaggcacaaatatgtccaccgatcggcgatgggctctatagcgtgaaaggcgccagggcgctacaaaatctgcacgactccacggagtgcaaataaaataaagttcccaactgcaactgtcctcaccatgcgttttcttcaatccttgacggcctccttgctgctcactggcagctcactatgcgccggagctactgggaccgcccaaaagggtcaccatggcgcaattgctcccaaggtgttcattgtgtcaatggtatgtgcggttccacgaaaggaaatgcagcatcgctaatagattatgacagttcgcacctgaagccgaagcttggtggaacattcccgaattcgacttgtttgcccataatatcaccatccccggtctttcgcctctattcccggacgtctactgcaccgagaactacgatgtttgccagctcgtcaccggagaaggcgagatcaatgctgctgctactgtcacctccgttgctttctccccgctgttcgatctcacccaaacctacttctttgtcgcgggcattgctggcatcaaccctatgaaagccaccactgcatccgcgacctttgctaggtacgcgatccaggtcgctctgcagtatgaaatcgatctccgcgagcttcccagcaacttttccaccggatatattgcgcaaggcaccgaattcccaggccagtacccgaccagcatctacgggacagaggtcttcgagctgaacgccgaccttcgcacaattgccgccaatttcgcgcgcaaggcaaacctgtctgactctgccactgcccaggcctaccgcgcccgctacaagactcccagtgggaaatacaaggctgccaccctgccccctagtgttgttgagtgcgatgtcgccacctccgacgtgtactacagcggcaatatcctcggctccgtgtttgaaaacaccaccaaggtgttgactaatggaacgggcaactattgcgcaaccgcacaggaggataacgccaccttcgaggtcctgctccgatcctcgatccacaagttgaccgatttctcccgcatcatcgtgatgcgcactgcgtcggacttcgaacggccctaccccggtgcaccggcgacctacaatctgttccaatcctcggagcagggcgcattcgagccggctattgagaacctctatattgctggtatcaaggtcgtggagggtattctggacgggtgggacgctacttttgctgctggtgttaaggccaacaactacattggcgatatcttcggttctctgggtggtgttccagactttggtcctggacgcaagcaggctcttatcggtggcggcgcttacagaaagcgcaaccttcagaacaacttcaagcgtcgtgtttaaagatgctctgtccttccaccggaaaacttgaagcttcaatttggtcatgatttgaagtctatgttatgtacctatatttgcatctgtgaaatctgaaaatagccatgggaagttcactcgaataacccgagagggaaataatcagccaacgcttgataccccgccacactaggatgaagatgatctcctatatcatactgtttcagcagctgagatgggacctggggatccctcaacacccgatcaaagtccagtaccgcatcaaatacgccactttgccggataaatttattaatttgctgacgagtcttctcccgctcgggacttgagtaaggctgcacatagtcggagctcgccgacgagccgaacggtgtgatagtagcgccgaataacggaattcccagggcatgcacccgtgtcgcgatctgttcatacgccgcaactagtttcttctcaatctccgcctgcgtagctacgtcactatcagcgccgccaatatcattgacgccttcgaagatcatcgcatatcgcactccagattgtgccaggacgtcccggtcaagacggctgatcacatttggacctaggccatcttgcagaattcggtttccgccagcggcctggttgagaacggcgatattcgaggtgggttcatgcttttgcattcttgccagcagcaaatccggccaactagagtctgtaagccataaacatgcacaataggacggcccacttaccgatcattgccatttgtagtgcttcctcgtccatcggtgatactgtcgccaattattacgaacccactggacttagaaggtagccgagcctctactccgctgacgaagtacctgacatgggggtcagattcagatttgcatttggggtaatcagaagtcttgcggggaaaagacccaccaatgatctgtgctttggacagacgagtcggtgaggttctttgcgccagtccaatccccaaaagccaagtatgaagtcgttctacttccaggatggccagtaatagcgaagccgtgctgtccctctgcgaggtacatgctgatcatcacagccgattgggccttgacagggaactttattgggtcggagacaaccatcccaccgttcgggatgtccacatctggaccaccattgaaggtcaccgttttcaatgtctttgtctgtagaccactgactcccacccgctgtctctctggtaggccgatagtcacattggtgatcttgagctcattcggcccaaatgcattagacagtcgaatgcggatctcctgtgcagctaacgaaacctggagcgtttggcgaatggtagtattgccgaagaccgcggtggatccattctgtacccccacagtcaatatggaggcattggtcattgtgataatggcatcccacgtacaaatggaattgggggtaggttagcgggctcgaccaactggggcatagtagtccatatattcacccaatgtgagtctcccgctttgtcatagtttgctcggttcagcaaagggtgtgaggatactaagtgggcgcatgacagggcgattagaaatatagatctgagttgaaacatagttgttgccgcaggtagtcgaccagctagtataagagtcacctttcccctcacatctcgaattgaatctcaatgtgcaatttatagctcttttccctcataattgtgtccggataatgtgggtaaattctatcggaaattgggctcctctatttctccgctgcaaatcctctccgcaaacacgaattgcggggaagtggataaatgcagctaccctctttgccggcatcatgggtaattcggtaaatgtcaatatcctgaagaataatagcggtagatattaaaagtacagttgtctttgttctatgctgtcttcgctatggttacgtgcaccccgggcctagatgaatagacaggtattcttatttacatcaaatattagcggtacgccaatttatggctagcagcttgatgattgaaggatatatgaacttcgaaattcttacggctagatactatttaagaacagtaaagtgattcgaattgagtttatgctagggcggttgcatatatgctaatatctcctaaaggaaatatataaaagttacaagaaagttcaagctttctcgagaaaaaaccaaactcgctgtcatattccaagacggtggcttgacctggaagagtcgataggttcaaatgtgatgaggtcatgcgacggatgcaaccctactttgcacaccggaatgggaacccctaattacagagcttctagatcttccagctatgtgtagaaatatctagaaggaattttaagaaaaacggtgagacgcgatctgcatgggataccaagggaacaaaggggcggtttatctgcgacacgggtgtcggcgagataggattcgaatcaagctcgccaaaaagtacttacatttgtcccccgcagataagcctccaagcagcccccaaaatccgaatgcgaccatctcaggcgatctttgcctgttcagctaaaccttccatgatgcggagaaacgtgggggtgatatccatgcatgggtaatgcaacattcccgaggtaatcttatctaatagagcaaggggatgtcacctctcgcttgataagacgaagctcgcatctggacttttataaatttgacaggtggtacaccgacttcgcctttctatctttcgttgtctataacaccttggatacagcatgtcgagtgcagagcgcgcaccgtcgcctgatggcacaatgaagaaaacggacaccttgggcactactgaggagcccaatatactgaaaggttatggctctgtcccgggggtgatggatgaggtgacccgtgtcgtggaccacaaggctgaacggcgtctctgtcggaagtttgactatcgtctacttcctatcctagcaattatgtgtatgtctacccaattctgtcattcatgcaggactgactagcggcagatctattcaatgctctagacaagggaaatttgggaaatgcagaaactgatgggatgagcaagggtatgtgaggtcctcgatccaagcggtaggcactgaagactgattgaaacgattagacctgaacttcaagccgaatgagtataatctcctgttatcaatcttctttgttccattcgtgctctttgcaccgcccttctcgatgctgggaaagaagtttagtccagcgcgcgtactcccaatcctgatgttctcatttggttccttcacgatgctctcctcagccgccttcaatttcagtgggatgtttgccctgcgctggttcctgggtatgtccgaggctgcattcttcccgctggtcatctactacttgaccacattctaccgtcgtggcgagctggctcgtcgtctggctgttttctacgccgcgtcgaacatcgcaaatgccttctctggactcattgcgtttggagtgttccaaatcgagggatctaatatccccaattggcgctacctgttcattatcgagggcggcgtcactgttctattcgctatatttgctttcttatatctcccacggagcgctgccgaggcgaagttcttgtctgaggaggagaaggcactagctttccatcgaattcaagtcgactccagtgcagtggtcaacgaagagttcagcttccgcgaggccctcggtatcttcaagcaccctagtacatacgcctggttgtgcattgaaatctgtcttggtgtgcctttgcagggtgttgcgctcttcatgccccagatcgtcggggggttgggttatcccaccgtcaaaaccaacctgtacaccgttgcaccaaatgtaacaggagcagtgatgctgctcgtgctcgccttctcctctgattggaccaaactgcgatcaccattcattgttctgggcttcatgctcactttctccgggttcatgatctatgcatccattgacgatgtccagaaagacatacagattgcttatttcgcgacgttcatgatgacttggggaacgtccgctccatccgtgatgctcagcacgtggtataataacaacatcgcccacgagggtcgccgtgtactgttgactagtatcggcgtgccgttggccaatttgatgggcttggtgagcagcaacttgttccggaagcaagatgcacctaagtatatgccggccctgatcagcgttgctgcgttcggtgctactggcgcttgtttgacggcttctctggcactatacatgtggctggataacaagcgacgcgaccgtaatgatggagtcacgattcgagcacgggatattccaacggagcgaatgagagacgggccggcatctgctcagttccgatggtttttgtaaatggagggttgggaaatcctgtctgtatttagttgagcgaaatcaatatatgatccatccatggataaaccccgcgttcactaatcgtggcaccgccttttcaccaacacaccaacccggtgatgtgcagagtagagcttcctttattggaggtagctagagccagccaataggacggattataagcctgacatcagctctccgttgtaaactcgtattgcctcaatcttatttcagcccccgcggccccccggacccttccactggcgaaaactcaacaccttgtcattgcgaatttttgaaaggaatttcgtccgaataaaccgatatgtcgcgaaaggttgatcagatgccgatgccggcagaggttctgccgatgaaagttatcgttgcaagtcctagtcggcgcggaaatgtcgactcgagccacgggtgaattccgatgctaacgaagttgttagttcagggacattgggactttaccaggcaatgcgaatcttgggttacaagacataccatttctatgaatgtattaccgtccatggtctaccccatatggaagtctgctcggaagcgatcactgctcagtataacagactctctggggtgaagaagtacaaccgggctgattacgataaatggttgggagaatacgacgtaagtgcaatttttcactcatgcgcatttgagagaagcgcacctgactcgtgttctcacctagtgccttgttgaaatcccaagcatgattggaccagatttgatcgaggcctacatcgacgatcccgacgtgaaattcatcctcacggagcgaaacccagacaaatgggtcacttctgtcaataacacggtcgggcttgtgatcgacatgccctatcaattcccattctctatcctcaagtacttcgatgcgacgttgtaccgattcctcgccatgaatgaactcgtttaccaggcgatgtctggatgcactagacctggtgacgccgaaaatgctcaaaatctgcgccagcattataccgactagtatgtaccgaaagcagctgttatttttcaagatgtattacgctaacaccaccatcagcatcaaaaaagtgaaagaaatcatcccggctgacaagttgtgctatatacgacttgaagatggcctcgactgggagaatatttgcccgttcttgggtgtcccaatcccagaagaggcgtatcccggccgcaatgagcccgaaaagtttcaaaaactggttcaggaatttcttcggccgaagatgatggccgctgttatgaggataagcgctgttgctgtcccagcaatcggaattctagggtgggctgctgtcgaatatgggccatcagcccttgcagagctgaaaagactttgatgtttaacatattcagtcaagaccaaaatatcttcaatgcccagccctagatccgttatcaaaaagaacttgaaagacgaagcaggaagcagcaaagtggtggtggcagccctacccgtctaccggtggacctatgtcgtagggagagatggagctacctcgggtggatgtcacactgatgcactgcctggacaatttgtcactttgcttttgtgtgactgatctcacaccaatgagctattgggcccacagttctcgcccaaagtgacaatctttcaatcggatctgacgtggtagtcgctcccgaaccctcccacatcgaacaaactcgttcagctcaccgatgcccaagcggacacgtacctgccccacatcacgtgagtggaaagtatataaaaccatccgaggggtcacgtcgtactccgaatatttgtctgatttcaacctctaattccactttacatgatataaacaatggcttccaataccagccagctgtcacccttgccggccgtcacacggcatatcacaggccacaatgagaatgggaaagcagtaatccattcctctacaccggctgaatggcaatcactcggagaaagtcagatggcattcaacgtggtttacacgaaccaattcgctccagatctcaacgatgatgcggacatcaagacccacgagaccttgacacaatcggacaagatgggtctcgttaacccgggtggaaccgtgtgtcgcattgtggacttcgccccgaacaaccctgctgtggttcaccggacgcagagtctcgactacggtgtggtgctcgaaggacaggttgaaatgatcttggaagacagcgagccagttatcatgaacagaggggatgttgcggtacagcgggctacaatgcatgggtggcgcaacaccagcgagacagaatgggcccgtttactgttcgtgctgcaggattgcaagaagttgacggttgctgggaaggaaatgaaagaagacctgggaattgcagctggagtacttaagccgagtggcaatagccaggagtaatgttctcagtttcttctgggataatttgacaatgagatttaatggtattcagagctcctgcgctctattgaatcttgattactaccttgccaaagtggctgccgctttccaggaacctgaatgcttccttggactcggcaaatgaaaagacccggttaactaccggatggatctggtttgtctcgtagaactggatcatctcttcaaaccgatccttaggaccgttgataattcccctgagtgtcaccgtccgacggagagccagcaggttgacattcaggcggtcttcatcggcatctatcttgcccgagacatagccaatgcagttgatcaatcccccgaaagcgatgcaatcaaaactcttccgcaaggttttagcaccgccaacttccaagacgatatcggcaccgtggttctcagtaatcttcatcacttcggcttcccaatcagggttgttgcggtagttgatagtaaaatcagcacctagctctttagcctggtccaatttggcatcggacgaggaggtgataatagctgtttacatggttagcgtttgcgtcctatcaacggtaataattcccactgcctacccttcgcgccagcggccttcgcaatctgcagtccggcgatagccacaccaccagttccctggagcaagatgtattcgtccttcccgccgttctgccccatcggtcgcatgccattgatagacatccacgccgtgactgaagcgatgggaagcgtagccgcctcctcatctgacatgaagctaggcgctttcaccaggccgtggtcagggaacacgcggtgggttgcaaggacaccatcctgcggcagccccagacttctgccaagctccttctcagtcacctggccggtttgatgatcgggcaggaaagttgagagcacccggtcgccgactgtccacttggtcacgccagatccaacctgcgtcaccactccgcacatgtccgagcatggcacgatggtggcatcctgttcggcggatttgtgatgtttatactcgccattggtcactttaaaagtctcggtcagtatggatcctgcaggtctgtgcttggcggacgacttaccttccacgtcgcggtagtttagagacacagcacggatctctaccaatacttcgctcggcccgggtgcaggcattggggcttcggtctggctaagactgtcaatgcccttcaagggcgtgatccattgttgaacggccatttttcaccactctaaacagaatattcaattggggcacggcaacaagtcaaggattgaagctggttataaatcacgttggagaaatttggagaactccccatctgggcctgcaccttggaagtgctgagtaatcgaggttttctgcccgggcatggatacgtcactatccttttcataagaatttcctcgggaagcacattacacaaatttggaaaacaagaagatctgtcagacggggttcaagaattatgtgggagtggttcatgacctatcaatccaatcaacccgttgcgcagtggtcagggcatacataatccgtctcaattgcttcgccactttttcatgcccggggattatttcaagaagcatatcagtgaactctggcgcagcggatctccgtgaatgccccagagtctgcccagtcgatcagccaaactctgccatcaggacccaggattaagttccggggcgcaatatcgaggtgtctgagaaccagccggtcgaaatggaagaggggagcatcctttggtgcctgcttaagtgttgagtgattcaagtcggcggttgaaccaggcctgtagttgctccttcgagccaaatgggccagctccggcgtcaggaaaccagtgaccacgggcgacgcacgttttgcaacccagagggccaggctgctgctgctgctcccgtaatggcggaatagagtgttgagcagtgatcatcgaagaaagctgggagacgacgtccaggtgttctgtctgactcaggtcgtcccagcattcctcgagtgttgtccctttgacgaaatccatgaccacgaggcatctgcacccgaaaaagacgccttccgtttcgatgttaagaacacgatgaaccttaggcactgggattgattgtgattctttcttctcacccgccctagcaataaactcaagaatgctaacttcgcaaggccgtctattgactccgccttgtaagaattaatgtctgtgacagccgcacaatacgtgttccttggtatgaacggagaatcggcgcggtgctgaagagctcggtcagggtttcatttgaaaccgtggaaatgtcctatccatcgaggggataagctttcaggctctacgctttttcagctggatcgcagtacgctaacagggagatacccagtcctatctcatgtatattgtgatctggtatatcagccattccatgaaaggtgtgtggacgctagaactgagcccgttgtctgatctagtgagattaaaagctgtaatcattcacatcatatatgatgtatgcctgggtgcccggttcatacctcaggcatgtaccctcgagttcgtaggttgtatggtggaatgtgagaatgatagattgattgagatagttgtagaaagctaggttctaaactagaagaagaaatctgacagattccttagcgtcgcatacgttgaacggaacttccctatgccttaggatccactaacccatgtccaactgctgtttacatcgaacctttccccacttcagccctcaaagttctcatttcagtatttgctattaccatcaagatctgcactaggggccgaattgtgttgacaccatcctacatggatgccttgttatggtggcagactgcgtgctcagtttcctagttcgaataccaggtttcttcctcctactacacactgacatggatttctcatgaaatcttgggcatatgattcagctgtctctcacagcttttcatcgagatcagcttcgttattgtcctcaagttcattaactacctacgagtcaactcatccttactgggaaatatctttgtcctcatttcctctcatcgtgtgaggatatgcctataccagtgtaatggtattcaggctgatcagaagtatcgaagcagatctatgtgcaaagtcatggaaatcttcgacatccagtataccgagtacatcctgaaagcacaggtcctcaccccaggttggaatcttcaagccgagatccgcaaaatgattcttggttgttatggttccaaactacgttccttattcgtgctactaggccggatggagctatcgacgatgggaaccttttcttggtccaggacggtccgatatccgtggagactttttctccaaacaagttgctttgcgacacgtcgatgtcctcggggtacttgattgctgctactctggcggcgcaacaagaacaatagtataggctccacgagtgactcatctctcactttgctctcaatttactttatctgttgatctattatcatgggtgttccatttcaagggcgtgatatgtataatatgtatgatatgtagatagttgatgcagattcactctcccaaaggctaagttctgagtattttaggatattacttgtatttagtagctacgcattgtatcacaattcttccaagtcgggtcaatgtgggaagtgcataacgcgaaccaatggatatttttgtttgactttctgaggcgatgattatgggtcaaacaccctacctatgtaggtatcaagaccgagtatctaggctcctgcatatgtagatagcccagcacgatagctaaggcagccccgcctcatgacggctagtttgcgataccgaaagtgtcgcatgatataagactacttgcggagtcctccacaggttagtacctttcgtaacaagcgaaaagtatctccaaaactgcttctgtctagcagtggataaccctatgaatatctctaggtgctgatttgaccatattccgtcttcacatgacagaagtgcaaatccgacgagcgaatatatgatgcacactagaccatgcagtggggcttatctccgccaaactccgacgtccttgctcgacaaccccatctcccttcttatcttcttcaactctcacgactcctttcaaaatgggcgacgcctcacctgcagttccaggagatcatacgcacgaaataccaggtgcgtaaccctccatatcggcattgccaagttaactcattccccgcaagctcatttccaccgctcaccggttacccacgcctccccgcgtttaccccatgccatcgcccatcgagggttcaaaggccaatatcccgagaacactatactttcaatagatggcgcaatccgggcaggagctcacgctctcgagctagaccttcatatttcccgcgatgggatcgtggtgttatcacacgtaggtgcacacactccacgatctaggaccacgctcatcgatccaaggacccaaccctcatgcgctgtttcggcatcaacaagaaggtcagcgactgcgactgggagtatttgaaaactctgcgaactctacaagctccccatgagcccatgccccggttgatcgacgtgttggaatacctaagtcaaccaggccgggagaatttctggatcttgctagatataaaggtagcgaagggattctccccaacctgcacattgtctctctcagaagattaacatcccacccactccccagctcaccaatgaacccttcgctataatggaactggtcgccaaaaccatcgagtcggttcccatacccacgaacggacccgactggcacagacgtatcattctcggctgctggtctgcacgatacctgcccgcgcgagcaaaacacctgccacggtatgcagtgacgctaatctgtgtcgacttgagctatgcgcgtcaattcctccaagtaccccttatatccttcaacatcaaccagaagatcttgatgggcccgctgggacgaggattcctggacgaggcgcgcctagcccgccgtcaagtctattgttggacggtgaattctccgaatctgatgcgttggtgtatccgacacgacatcgacggcgtcatctccgacgagccgggacgattccgacaggtctgtgaggggtgggagaaggaacgttcgggtgtattgggtatcccgaatcccaacttagatcggatcactttgagacaacgtatcgagatcatcgctgcgacgctctatgtcatttgctttggctggatcttgaagcggatgtaccttactccggttgcgcaactggagtttgaggatcacaagtcgaaatagttgcatagcgtcttgctaagggtgcgatggcatattaatggttaatgatagatataatgagacatgatttcgggttattgaaccttgggaaagaagacattatgtccattaaacttgcaaaaccttatacagtataaaaagcaatacgctaaccaaacaccgagccgatagagagtacattataagcatttcggcgtcaaaaaatcaacaaaatacaccccgtatgatggcccaaaacaacaaaacctgccaattgggcgttctcaatggatacagatgaagatggccccgatgcgagggtaaaacagacgatcaacgccagtgccagtgccagcgaagccaaatgggtgagtagcacagagggtatatcgcaatatgtaattgaatgaagaaagcgggtgatgaatccgcggtagagatgcggagaataggaatgtgcaactcagcaatttcgaaagctcgcatggaagaagaatgagaagatgatttactcaaatcatcataagcctagttgtccgtcgttcggggaaccgtcctccaccgccaggagggaatctagcaccggggtggagtccaggccccggtccaggtccaggtccaggtcttccgccaggtggagggtacgagcccggtgggaagtggccagactgggccaagggagacgagggcagagttggccggcgacgaccagaaggaccaggaggtggtgggtggtatgcagcagcggctcggcgagcatctctttcacagaagacttcgccattccactcgaagtagtcgcccttcagaaggacgtggcatgtacgacactgcagacactgggtgtggaatcgacgacgatctgagcgcccagggttccgttcgacggtctccaagtagtggccctcaattccggtgtgacagccggcgcaaagggacccgttacgctcgtggtaatgttgtgcgcagaagggtctgttgttgaggacgtagaaatcggctgtttggaagggagagtggcactcaaagcaaacgaaacagccacggtggtatcgacctgtgagacggccgtccgaggatgagattgattttcctgtaattgtctcgttgcaacctttgcacttccccttcgagcgtgtcgcggaccgggttggtgttgctggtgtttgtggttgtggtatgggggctgtgaatgatcgttgtggagggggctttcgggggatagactgttttggttgttgtgtggtcggagtcgggggtatgtctttcttctccgaaatcaatgacacaccaccttggttgattgaagggtcagtaggtgaatccgggctgaagaaagcagctgggataggagggacatcttccatggtgctccgcatacggccgggtacttctacaatcgtctgtcgagtccgcgcgggcagttcttcgaccaagggtcctaggttgagcggatcggtgggcttatgcgggttcaagctgacatcggagggaagactggacatggaactaccactgcgtgcatcggaaggcgatgaatccgagccagaagtttcagagtgattcatttggtcctccagaccgagagcccgggcgaagctagtgacggagaatgcacttgtcgtacttgcgttggagcttttccttggcgcatcactacctggctctgttgccgccgttgcagggtgaaggtgggtttgtgcagaattgaaagcggtatattcaggatgatcctggaactgggtcgaagggggttcctccggcagatcttgtagtccggtagtttgattttggcctttgggaataccaaagtcgaatccgctggcttccgccttgctaatccgggatgaaaccaccgagacattggaatcacgggggaaagaagtattgttgggggtgcggagaggtgccagtggcaccggtggtgtgtcgtccataaatgaccggaaaccacgcgagaggctgttcgttgatgacctcgttgtggaatcgccgtagcgactgctggcgaaagacgaccggtagctgctgttgctcactgccgactcccccctgtgatgattcgtatctggggacttaggtggcagcggactaggtgggagatgtatattctctggggtcggactcagcgcttgtcccggcgggactggtggtagtgctttaagcgcagtccgatccatcattggacttggtgtcctcacttcagtcggtgaccggtttccaggcatggggaatgagaaaaccgaatcatcattcagactgtgttgagacgggcgcaccatggaagggggtgctggactggcagggagaggtgatagatggacactgttagctggtgtcggcatatttggctgcaaaaatgctcgatctatatgtcggattagtcgcggatcccttgcactccccacatggcaattgagacatacttgcagcggaggggtctatggccgggggagggccccggccaactttcgtctccatgaatcgatccgaatcgaagcctgccgatggagggggtgatggaattgttgtaggtgcgactgctataaagtcagcacgttaactaggtgttgaatattttcaaagcctaccaaaatcatttcgaatgcaagtatgatcccccatggaggagatctcgacgttgcacccacaattggagcattttatggtgggcaacatgcccatgttcattgaagccatcaaggatgaacatcgaattcagtcatatcccctcgagatatggggaagactattctagagtctacaacagtagagagaagttgaggagaattagcgattgtactggggcctgctttgtgactggaaaaccacgctagtgtgattagcgtctccagtgcggaaagggggtgcgtaactgtgttcaggggttacgggtattatattatattatattatattaatatttattattattgagtattatatcatgatattatcctattttcagctctaaccaagtacgtagatagatagttctctacggagtagttctattctatactctctaccatccaaaggaattctcccctgacccaaacagtggagctccatggaaaaggatacttcaacttgcaatgccactggtccgtgatgttggatccgccaatcacattgctcaatgtttgaggcaatctttcgatcagtggggatcatcgtggaaaccttggaacccttgaaagggtacctgtctgaattttgaatagtttctgacatgtattctgtaaaatcagactttctcccctagaaggccttctgtaatcatgtggcgacagtcccaaatgttgggatattcttaggacacggcaaagaaaaacacaaacagctttgtggtttcgcccgtgctggcgatccgcggggccatgttttccctccgtccagggtgcccactcctattactggtcactgctctccactcggatcatgcatgaccctgacacttggcccaaagcagaagtacacatgtactctgtcccgaggacaaagtatattgtattgtaggtactctgtacggagtacattactaccgtttaggtagttgcaggatttaacgcgccaagcccgggtattttgatcttgaaggctcgaataacgcgtgtgacgatcggggtgggaatcagaccagatgctaccccgtatggggcttctgatggcgagcgggagagggacgatcatcttgtcgcgccggtgcctcaagctcagacacggattaggggagatgcgagacagtctctcgtccactttctcgctctcttgctgctctcctgatgtagtaccaatgtcaacgcatgccccacttctcccgaagctgtcgctgcagcgcatgggttggccagccatggagtgcatcagtttgaataagaacttggatcaaatggtcctgttcatgtgggtctgtgaagcgatcgccccctgtgatcctggtcagcctcatgtatactcacttgaaaataatgaacagtggtttccgctgcttacagagatggatggccatgcacccaacaaccatggctggaggcacagaggcattagataacgaagcgccacatactttccaaatccccctgcggatgtgatcctaaatcacctgtcagtctctgctagaatacgtaatgtagattggaatcagacacgtacatcggcctcttggatcagacgcgtgcgcagaggtccaaccgtaggcagagtcggatcgtgcacagaaagcaagatctgggcaagatcgatatattggttgccaattgctataaccccaagcgattagccgcagttcataacctaaataacttcctggaaacaccacttcctggaatgtcgcccgatacgtaccatgccatggacacccgtagcgaatatcagggaattgggttcccaccgccacatcttcacccacaaaataagggtcgaaagagtctggccgagtctcactccattgctgattatgtgccttaagatctgcgtagacagctgccgagcgaggtccctccccgaaacaaaacaccaaaacgtgggcacaatgagtgatggcttgattcgcccatgcgcaatcacccgcatcagggcccagtgagttaaggtgggaatccaagtccaaggacctcagctcaatgtctggggcttggtggaggctaagggcattgtaaatctcctggcgtaggccactccagtagacagcctgccgtagacttggggttgttgtcatcattgaaggggaccgtatgaaagcctttgtcccgaaggagtggcctcgaatatcggacccggcgagtgggactatgagcttggtcagcgcattcttgacgcaccaggggacagatccattactcaccatcgaactcttccagcaagcgaaggatgacagtagcagacagtaaatcatcgtccatcgtaacaccgtggtcattgagcgcagggatcaacttcgccagacatgcttggtaataatggtccgaaacaaaagggtcaaaccctgttgtgcgattcaaatgacgagctgacatggccaatattgcattgaataatgtctcacagcggcgtgctcggtaggggatatggatggcaaaatgctgctggcgatccgtgcaatcgaactttatatcatacagtcagactacagcttatcatttagaacacaagataatcacttacaaagggcgcaaccttttccacaaaatgttgcagcaaacgcgcctcttcgggatctctcaagggccatggtcgctggggtaatcgttcaggtgtgcccaccgagggtgctaccgaaacagcactacttcccgtatgtacttgctggtttgggaaaccatattgtggcaaagggggagtatatgaggacccgggagacaccctttccggtataggaatggagtcggcatgactatgcaagctcccggcaggcgacaggacattggttggcgtcggggtcgagctacccacttggccgcttccgctttcgagcacaaagtccactagataacggtcctttgtcagactagatcactggatctcagggaaacgggtgcagaatccaacctctaggtggtggccggagccaaacttggttgctaggaaacttagtgcgcgttgtccgaccctttgcctgtcgaaacttggtttcctttttaccacgagtgcattcgcgacctgtgcggacgcatcggctgcattgtggcaagactccgtcacctatcccagtcagcggagagttggttgtgcgggggaatcggtagtattacatttatggtgaagtacacggcatggatcactgaatataatcagtcaaagtctcaaaagccgctaagatcatttaggtcattgcttaccaacattgggggttcttcgcaccaggcatgacggagatgttgattttcttcacatcctccgtcggggaaattccccactgcgggggatttaatccgggcgccccaatatgtaggtggcgatagggttagtactattagtattctaaggccccattttaaggatagcttgttctagggaaaatgacaataataaagagaaatgtccatctctcgaatggcatggatatatatttttaccgaatcatcaaataatccctacgctataggagttaaaccgaaattcgatagataaagcaccgtaggggcttcaaacaaagactatatattattataggccaattctattgtcttgttgcgttgtagcaatcgagtccgactgccgaacaatgagatggtgcaccccttgcagatatctcattcatagatcttctttatctgagactcaaaatatctctgctaatggacaccttgctgaacctgtaaaacatgcatttctagaggctgagtgagatcggaatgcaagaaaacaacaaatatgcaaggatcgaactcacacgacacaattgcaggatctctgattaattctaaatttcgcacctggcaaagttccccagactaacaactttattccaaaccttctttgcacactaaatgacacgttttcttggcctccgaggcagtcgcctcaatcatgtagcactgcttggcgtggttatgcctgccatcatgtcattaggctataaccaagggttactagggggagttctaaccatgccctggttcgagtcccaatttcctgaaatcgatgtgagcaatgccctgccttcagagaaacaccacaaatcgactcttcaaggtaccgtggtagccttgtatgcagcaggtggtttcttgggcgccatcgcttgcattgggctaggtgatatgcttggacgtcgacgaactatcatactcgcttcagtgacgcaattgataggggcattcctcatggctagttctttccccctttctcagttggtggtatcacgggttattctaggtctgggcactggtggccaactagccactgtgcctatctggcaatcggagatatcaccagctagcaagcgtggtgcgcatgttgggaccacaggcatctttgtctcaatgggtctaaccctggcattactcgtcgaccttgggatgtcttatgtcgccaacagcgcaagctggcgtatccctgttggattgcctatcatactttgcatagttgtgatcgtatttacttctcatatgcccgagtcgcctcgttggctggtccaacagggccaagtctctgctgctcgtgaggtattggcagccctgagagacacggaaatggacagtgagatggtccagaaggatatactggatgtggaatcctcgttagctattgtcggcggtaaagggtctttgtgccaaatattccaaatgggacatcaaagaatctgccatcgcgcatctgttgcaacagggggattggtgctgttacaattgactggtgtcaactctatcacgttctacagtacgttccctaatctttcaatcccatccaattgccctcgctcatggataaccagctacgacaattttccatacctaccttcaccttagcccaacaacatcaatgattctggcggtcatttatcaactttccggtgtctttggtggcattctatgcgtgttcactatagagggatttggtcgccggtttctattgttgtccagtgcgacggccaacacaatctccatggccctagtggctgcgcttagttcccagtcgacaaacatcatttccatgcacgcagcggtggtctttatgttcatctttcacttcagcatggtcttcggttttggcggggtaccatttctctactcatccgaagtggcacctctcagtctgcgtaccaccatcaacggtatcggctccagcatatattgggctctgagtgttctggtcgccgagatcaccccaatcgccttcaatgccattgggtggaaatactttctcatctttgcctgtctgaattttgcaatgataccggttgtttatctatttttcccggaaaccgcaggcctctcgttggaagacatagatgaggtatttattatgtccacgggctggtcagactctgttcgtgtggccaaacaggtgcacaagagattaaatggtcgcgagccccagggagatcgtcctttggggaataaagacaatagagtaccgactgtttgagagtataaatgtttgtttgacaatacgaacggagttaggatttgaagtgtttggtcaacaagaaatgacaatagtttgccatacaaaagaattaaaattatttctaacgaagtaaattttgcgatatttgtgcctgagcatggaagaggtaagctcttcttactatggcattactaggtatttaccactcttcatttatataccaatcatgagactaccaaaggatttaggttccattttggaatgcttttgatctcatttatgaggttacatatgtatacaggaaccgtggacggaataatgacggcaacagcaatcccatttcattgtaattgaggcttgaatagaactatgtatgctgtttttgtcgcctgtatgctgtttttgtcgccagactgatgaaggaagacacagacagataacactaagcgtagatgttggtttagaaaaattcccaattgctcaaggcctctttcaggggcttgctaccatcccatacagactcaagcttcctttcatagggtggctgtctcaccaaggcgttcagtgcatctacagagtgacttgggtgttcccagagaccgggaaatacactccactagaacagattccctcggaaaaggactcttctagatggaatttgacgagaaggatgggaagaattgatggagcaggatgtcttcgtccgtaagaggaaagtgtaggatacataagaattggaaggcgggattttcccttggtccttccgccggaacgtgtcttagtggtcttctccgattgtcttttcagtagtcctttttagcagactccttaagaaaatgggggctctatagttttgcagatatgattcgctttaatagaagattgcactcagaagggaacaacattggaaaatctcacttaacaacggaggcataaaccagcaccaacacagttgagcaacgtaaaatcaacaactaatacagaaatacatgagacaacatgagctgacacactaacctcggatgccctaggatgcaaacatcatggagcctatggctaggtcctgagctccgtaaatgcacttgcatgtacaacccacctatcgtctctgtacgattcctctgatactccgtatgtcctaccaagtcgataatattagaagataataatacatacaatgtaataataaagcaattccagatctgccaaacgtggatgggctgaccgccattttgccccgcggagcctgcccctccgatgtgctgcacggtccaacagagggctcgtggcatgatgtataagtccacggggttattctataaaactacatgtacaatgcaattgcaattcaattgcaattggaatataatgctcacagctctatgagaattcaatcacaaaatgcagaaccgaaatacgtcaccgggattcgtatccggaaaggagtttctcgggtcgccaggcaccagggaaacccgtggaagccggaagcggagccccagacggtagtgggaaaaaaaactggagattcaggaataaaatgggctaggtcgctgatcacgatgcatcatctacaacataggtagctatgtactccgtacctggagttagtacaagggaaacaaaagacatttgcagtgtgctatactccatatgcaggaacgaaaagaatgactactgcggtatcggctagaccatggacagccctagaatagacggtgagatattacaaccaataataagatgaaagccaatttaatagctcgaagcgaaggggaaaaacagaaaagaaaaagaagaaaaaagtcgaaaagggggaagccgggggacaagggaccggtggaccaggcccccggagacaggcggagacacataaagtcgcccacctgccacttcctctttctctctttcctcttcttctcttatcctcaatcctcaatcttcttgctccgtttattttaggttcgtataaaccttgtcagcaggtcagatcacttctcttcgagacagtggtcacatacaaccgccaaaattttcgcgacaagtcttaactcgtgagtcccccctctatagacctcttagagctatgatcatatagtagtccaattgctaactcctccttaggcggcaccacccgttcaacggccgacgctcatccaaccgtggaggagcatcggactgcgcaccctacatccgttagagctacgctatcacacacacttctatcaattcgcctattcatcccgctgtgaacgcaatggctcctcacgctagctcggatgctgccaatggcgcgctgaacgggtcggttcgccaagaatcttccctgtttactgtccagtcccccaatgtcgtctatactgatgacgagatcaagtcgaagtacgcctatcagactactgagatcacccgcaccgcggacaacaagttggttgccactcccaaggctaccaactacaacttcaaggtcaaccgcaaggttggcaaggtcggtatgatgctggtcggttggggtggaaacaacggttccaccgtgactgctggtattttggccaaccgtcgtaacctctcctgggagacccgcgatggcaagcagacctccaactactacggttctatcgtcatgggctccactgtcaagttgggctcggatgctaagaccggcgaggagatcaacatccccttccacgacctgctccccatggcccaccctaacgatctggccattggcggttgggatatcagcagtatgaacctcgccgagtccatggaccgtgctcaggtgctggagcccaccctcaagaaccaggtccgcaaggagatggccgagatgaagccgctgcctagtatttactaccccgacttcatcgctgccaaccaagaggaccgtgccgacaatgtcgtcgagggtgacaaggcttgctgggcccacgttgagcagatccagaaggatattcgcgacttcaaggcccagaacggcttggataaggtgattgtcatgtggactgccaacactgagcggtacgccgacatcgtccctggtgtcaacgacactgccgacaacctgatcaactcgatcaaggccggtcacctcgaggttgccccttccactgtgttcgctgtggcttcgatccttgaggacactccgttcatcaacggctcgccccagaacacctttgtccctggtgcccttcagttggccgagcagcgtcgcgctttcattggcggtgacgacttcaagtctggacagaccaagatgaagtctgccctcgttgacttcctgatcaacgctggtatcaagctcacttccattgccagctacaaccacttgggcaacaatgacggcaagaatctgagctcccagaagcaattccgctccaaggaaatctccaagtccaacgttgtggatgacatggtcgcggccaaccacatcctctacgagaaggatgagcaccccgaccacactgtcgtcatcaagtacatgcctgctgtcggtgacaacaagcgtgctctagatgagtactacgccgagatcttcatgggtggccaccagaccatcagcttgttcaacatctgtgaggactcgctcctggcctcgcccctgatcatcgacctagttctactcgccgagatgatgacccgtatcagctggaagtctgacagcgagggcgacgactacaagggcttccacagcgttctgagcattctcagctacatgctcaaggctcccctgaccccacccggtacccccgtcgtcaacgccctgggcaagcagcgctccgcccttatcaacatcttccgtgcctgcgttggtctccagccagagtccgagatgacccttgagcacaagctgttctaaaggacgttgtccatgcttccctagtttgatcattttgcgcaccaactacagtcactcgtttaacaatacaagcttacaagcctaaacatactacaaccatccttcctattgataaattcgtagttttcatgtaagcgtattctcattctctaaccagattcatatgtctattcattggtccgaccaagctcggagtaagcattcaaggccaactgcccaccgaggtgggcatacaagatatttccccccttgatctccccacgacgaatcatatccatcatgccggcaaagctcttcccttcatagacaggatcagtaataaacgcctccatcttcgccgcgtactcaatcgcatcccaagtctgacgatcagggacaccatagataccagcatggtaccgatcatcaagaataacatcatcctccgtaatatcatcctcactaagcccaatcttagcagcagtattcttcgcaatcctcaaaacctgcgcccgagtcgcctccaccgtcgccgaagcatcaatcccaataaccctcctcttcgcatccgcaggatacaaccgctcaagcaacttaaacccagcaatcatgccggcaaaagtcgaccccgtaacagcacaaacaagcaccgtatcaaagaaaacccccatctccccctcctgctcccgaacctcaaacgcccaccgcgcaaacccaagtccaccaagcggatggtccgacgccccagcaggaatatagtaaggtttctccccatcacccctcgcctcctccacaaccctctgcacggtattcttatgctcgatcccgaacccggacgggtcgagccgcacatccgcgcccatcagccgcgacagctggatgttgcccgtgctctcgtagcccgggtctgtccagtcgacccagtgctcctgcacgagacgggcttttaggcccgagcgtgcggcgacggcggcgacttggcgcgtgtggttgctttgcacgccgccgatggagacgagggtcgtgcagccttgggcttgggcgtccgcgagtagatactctagcttgcgggttttgttgccgccgtaggcgtaggcggagtttaggtcgtcgcgtttggcgtagattgttaccatggggtgggggttgtttttggcgagatcggctgttatgcgggggagggggtggattggtgaggggcctaggaggaggggggttcgggggattgtggagaagggggttgggagggtgactgggtttgggtctgtcattttgggtattgtaggtggtatggttgttgttgtggtgattgtggtgctggtcgaaagacttgctctgaagtataagacgagtaaagcaagagtgatagacagaatgtagagaaggttttgaacgagttcgttctgtacaccatgatgtccaggactatataccccccgcaaatatcaccgcgggcatcgccgcggcgagcggagttgggaatggggtctgataacgcaaagcagcccctcctagacccatcagtgcatgaatcacgctatatgcgggcaattcaccacctatcacaggtcgccagcaacgttattccgaagtagaaccgagactgggacctctatctgttgctcgttggtgtggacgcggtggggatttcggaccctctccggcaggagcataaactgaacggtatgtttgactttgttccgcggctattgttctaagtggagcatgcttcgtgtttagaaggcttaggctacccaaaaggagaggaagagagaacgtcggaaggaaatattagacgttaacggccgctagttaacttaggccctaacattgaagacattcgaatgccacggttatgcggcttgtattatctattcgatctacaacggtgctaacacgtatcttcctgcaattgcatttaactgatggctctagggacattattgctttaggcattattgctttaggcaacccattgagctgatgtcagtgtttacacatccgaggtcaccctcaaggtgccgcggggttgaggaccttgaagacaacctcagacctacaaaagtccatacacccccaatgcattgcactgttatatagaaaaattcgaatccaagaaataattaaagtcatatttcacatcaggtattttatatcgactgccaaaatattgcgcctattgcaggtcgacgacgcaacgaacacaatcaccctccttcatctgctcgaaagcggtgttgataccatccagcgactggcggtgagtgatgaactcgtccaccttgagctcgccgttgaggtagtcgtcgaccagaccgggcagttgtgtgcgacccttgatgccaccgaaagcacatcccttccagacacgaccggtgacaagttggaatgctgcggcgtgcgttagacgaaacgaatatacattgggaagtgaagaacagcgggattaacttacggcgagtggcgatctcctgaccagcagcagccacaccgatgacgatgctctcaccccagcccttgtggcaggcctcgagggcagcgcgcatgacaccgacgttaccagtgcagtcgaaagtgtaatcacagccaccatcagtcatctcaatcaggtgctcctggatggtcttgccggcgagcttggtggggttaacgaagtgggtagcaccgaacttgcgagcccaggcctctttgccgtcgttgacgtcgacagcaatgatcataccggccttgttcttgaccgcaccctgcacaaccgacagaccgacacagccgacaccgaagacagcgacgttggagccctcctcgaccttggcagtcacgacagcagcaccgtaaccggtggtgataccgcagccgagcagacaggaccgatcggtggggatcttaggagtgacagcgacgaccgagatatcggcaacgacggtgtactgcgagaaggtggaggtacccatgaagtgcaggaggtccttgccgcgggccttgaagcgggaagtgccatccggcatgacacccttaccctgggtagcacggatcttaccgcagaggttagtcttgccagacttgcagaacttgcattcacggcattcgggggtgctacaattgtcagtggactgtcatgccgaggtcggagccgaaaacatactagagagcgacgacgtagtcgcccacattgacggaggtcacaccctcgccgatggactcgacaataccggcaccctcgtgaccgaggacaactgggaaagcaccctcgggatccttgccggagagagtgtaggcatctgtgggatgtcaataattgttacgctgatagggtcggagtttgtttcggcgtttgttttattttccgtgcagaaggcggggctgatggcggggcttaccggtatggcaaacgccagtgtggtggactttaatgcgcacctcaccagccttggggggagcgacctcgacgtcctcaacggacagaggcgcgccggcctcccaggcaatagcagcctatcgattgttcagcattcatgattcccagacgtgagctgtcttgggcgacgtcatatgtgcggggcggtcggatcgagcttaccttgcaagtgattgtctgcagattttcgagtcagcaagattattcaattagggaaaatcaagaaacaaggccgagtaatttacctgtcctactgtgctggccattgtgtatgattcctgaactagaagattgttaacaaagtccggaaatgccaaggaaaaaaaataataagactcacatcaagaatacgatggttgaggaagaagagaagaggaaatgacgggcttttgaaggacgggggtggggtggagccgggaatgaggggaaagataaagcaccttttgggaagttggagatccgagtagttttacaagtcccctcatattattctccccacttggggaaacccagtaagataaacgccatttttcgaatagaaaggaatatacgtgatcgggagtgctcccgagctccgcggggaaatgccgtagggggtatacataccctatctgcctaggtgtgctacatatgtatacaatattagcactatattttggcacattcaatgctgattaggtccgattacttacactgacattcgttattctcttccatttttctctcagaagaccagtgtttaacaaaagcagcgcgtcgggtacctcggaaggccgcatcaatcgcggaatagtcgatatatccgccttccggcaacccgaaacaccgataaaggaagacatagcgttggattggaagcaagacgacaaggacgacagtgacagaaaatatccgacaatcttcaacctcgggttcgtataccaaaataagcaaaacaaggaacaagaaacaagaaacaagaaacacgcgccctcggccttcacgaccgctaagttgcgttacttgatagcagcaaaggatatatctcgagtatgggaagacaaagtcagctccagctaagcactactttgcgaacccgtccaacgaacatggccccgtctcatttcgttataagtcttttgtattttgagccccgggagaggagaggtagatatctcccgtgctagtcactatggtacacggaaaggagccgatcctgtctgcttcctcgccaataggtcatcgaccacgctgtcttccctctaaacatccagataaagccactgccgagccggacacaaccgggtcgatcgagccgccttgccaatcacccaattcatccaatgcatgttgccacaatagaaaatcgtgctcgacaatatgtttcttattatcaaaatagacccttagttgcctcccatggagccgctctgcatcatggcagcgttctgctcctggaagcgctcgttcagccgggcggagctcttgaggttcttgtcgacacagcgcatgatgcaagtctcctcgcggttgatgagtgacttggtggtgaagtcattgacacagtcatcgaagcagcgctggaccatcttggagtacatctgaaagaagggacgttagatcttgaacatgggagaagacaggtggttgatggcaggcagacgggaccacgggcagggggataagcgcagaggtcgagactttagcaaggaagcaggtacatacagtcataaactccttcatctgcttccgctccatgcgggaagcgaactcgcgttgttccgatgcattaagtctgtgacttgagtattagcggtttgcccagagaatgatccggaggatcaattgcagtaaaaaacatggcagggaagtaaagcgtgttcaaaaggaggtacttacccgtccattgtgatagatgaataaaatcaggatggtttgatggtaagatgctttccacaagtctcctgccagctgccagctccgctggttctgagcttctcgggtgccggagaaatattagcccgaatatcattgtgccttagctaccaggccacaacagtgaaacatgtcagcttttgttagtcgtctggcgcgtagggaatttactccaactattttccagccacctaaaattcaagtctataagaagtccacatttataacaatggcgtcagatagacaggtactccagaacagtctcgcaagaggtttatccgttcggaggaatattcctaatctggaatcccgttccacgtgatatctcaacgtcactaatatttcttcaacctcacttcatgacgcgatgaacagctaatgccaccttaatgaagttttacgtgtagtcaaagggttttgtgcccatggttagaaagttacatcccaggctgaaaagaaccttctcttttagttatgttatttagagttttcaccggtataggtgacaatatgatgtcaaaacctccatgttgaacatgcatcatcagaagatatttgaaaagaccggaaatagaccggaaagaggactcgaggacaaatatgatgtcttatgtcattctagagactaccctgtacccaagatacactttcccgcagtgggccaagtgacaacggatatgctcttataaagcagatggtccgtatacttcaacttcattggccacgttgttaacccaaaggccaaacaagttgaaaaaccagggtaaatgaaaatcggtacctggtccggaagatatgaaacccgatataagcgactgatcttcaaatcaaaaagggcccctaaaatggtccaacacgttccagactatccaagacccgttggttccagactacgtcgtagtggcgggggtgctgttcttcatactaattatgctccaattctagaaattccagaaattctactagtggaagatctatattgcaactcccatataagtatttatatgtagcaaatgagatgtcccaattcgaaattctgcccctgtagccattgtgtaccctgtactccgtgcattgatccaatttaatctatatgacaggcgaccctgacccatctttaacttgtcccgggaaccttgggtctttaaattgttctattcgtagcctattctcaaaaagaagaaaatccccccctgaacaataccaaggtaaagggaatcatctctgtcatatgtgttcggctcttggctcgtgccccccgactcattgaccctttcgaaaccctgaccttttcagccctttcgcatcccttcatccatcacactctcacacataccgtccccttctcattttcctctcaaccactttattctcagtttcttattctcgaatcccatctcggctcttcttcccctcggaaacgtgtctgtgctattttaggcccagccccaggatttcccacacgagggcggtgacgcagggccctttcaacttcccgaatcccctcgatcgacacgcccacttctccgcgcttgtccgattcccagcatcttcgattccatctcgagtcgccttccggactcgccatggtgacggtcggcaagtcgcacccgggggctgaccctgtccaccctctccccacctcacccgatccggtcggcgccaactccccgccatcaaagcgagatttagcttcgtggtggaagcagttcaaacgaagcactagaaaggatgaattgaaaggtaagccatttttggtgaatgcgatgttagaacacaggcgaccgcgtaaatgtgtcctggggcgctctcggctcgcggcggttcgcgacaatcccctaagccccctcgtcgcacagggcatggttgctgcagttaaccatgtcggagctgcgacttcggtcgctgttcaattgatttgtttgggttttcatcgttgcgaactggtatgctgacccgtttatcgcagaagaggcaccttgcggcatcttcgggattgcgctcaatgtcagcatcaaatatgccaatgtggcaatctccttgaccaacgaccatggcgagagcttcatttatggatacgtgcccatcgtggtcgcaaagtgtggggttttcttaaaagaaaaaggttagcatttaccctgctgttttcgatgagttatcgctgacctattttagcaacggatgtggagggcatttttcgtctaaacggatcagccaagcgtattaaggaccttcaagaggtcttcgattcccccgagcgatatggcaaaggactcgactggtccggatataccgttcatgatgcagcaaacgtccttcgccgatacttgaaccagttgcccgaaccaatcgtgccattggagttttacgagcgcttccgtgaacctctgcgtatctaccagcgacaggtcctagaaggcaaggatacagccgatgccgataagttcgatcacgcaaaggcggtcgagacataccagaacctcatcatcgagttgcccccattgaacaagcaactgctcctctatatcctcgatcttctcgcggtcttcgcctcgaagtccgatcaaaaccgcatgccgtcggctaatctgtccgcgatcttccaaccaggcatgctgtcccacccccagcacgatatgtcgccggaggagtacaagttgagtcaggatgtcttgatctttttgattgagaaccaggatcactttctgttcggaatgagcggtacggctgccgatgagcagactatgaaagaggtcgaggcagggatttcacgccccgcatctcatccgactatccgacgatcagtatccaacgccagtgcgaacacagaaagtcatcgcaagttggacagcatccgacgcaatgtctccgtttcgtcgcgcaactcccgtcactccaacaacgctcaaagcccagtaactcccacctccatcaccagcggcggcggcggcggtgtccaccgaagcaacaccttgccctcaaagatgggccccgtcttgacctccgctcgttatgcacgagccaacgacactggctcgaacaacccttccggcctcgctgtttctcatcagagttctcgatccactagtcgaacgccatcagtgcgcgaagagccggagcaggcccagccgatccctgagtcgatgcctcaggcgcctcctcaggcggtccctgaacagactcccgagcagcgtcccgagcagcacacccctagtcggtcggctacttcattgaatccaggaaatgcttatgtgcacacgtcaacccatggcccattgcctccggcagctgctgaacgtctcagccttagcgaaactgccagaccgcatgagaatctcaacacagcagtcgcatcacccccagtcgctccacccccacaggttgtcacgccaagccgtgagcgtaaactctcgaatttcttcacaaagtcaccgccacaagatagtgaagtgaaggaacatcggcagccgaaccgcctgaagaagaagcgcattcccggtagtgcaagcatgagcgcacaaagctcggccaactccctccacgcctcgagtgtagatcccagtgcggacattgaagctaagcaggaaaaccgttccggggaagctgctgttggcgacaccactccaagaccgccaaatactgcgacactcggcaaccgagagaaccctcttgagccaaacccggctctcgcagagggtacaacgcaacctcacactgaccactctttgcgacctaacaagtcgcgcacgccctccatgaactcgcgttcatcgttcactgatcagtctgacatggaccagcctgacgatgtctctcgccacgagaatcgtcgtagttggcggttccatcggtctccaaagcgcaccacggagcagcttggattgggtttcgcatctccacccctgggggcgacaaatcctcgagctgagcaaagcaccagttcgatcggcagcggtcactatcaaaatacggacctctctagccacccactcagcctggatgctggcgttcaaggcacttcctccataggatcagaacccgagaagaagagtttattcggaaagttcaaggcgaaggtcgctcaggttcgggatggtgttagggatgatcgtgagcgcacaaagagccccacccggtcggagaacgaccctgcactcgccaaccagcctctttctcctattgctacagagctgacaaatggcaactctgcctcagtcgacgtctcacgtgaacaacctaaggaagagcatatgcgctcacctgtgtctcccttgcctggcgctggtctccccccatctatccccgaagagccgcatagccctgaggcgtcggcggctgtgcctgtcgtcgaccagaaggagcccgtcgaactgcctgctaccgagtccgtgtctgcaccagagccaccggtgtcccatgaaatcctgaaagagaccgcagggtcgtccacctcggctgcttgatctctttcaaactgttctcacaaattgtttcctttctcccactcctattattatcacgattgctcctccgtcggttgcacctctgtcttttatcaagttgtgcaggatttgtttgaccatttaaaaggtatggcttattcacggagcattggcgtcgcttcaggcgttggatgatgttgtttttctcgttttttattttcgttcgtgatgaatgggcttcgccctcgttttcgtgaccctcttgcactttcatccctttgctgtcgattggatggcgtggtgccttccaagttccctctgaatgacccccatgtattctttatcgcgttgctcccaacccgtctcctcgcaatggtccgaagctttcttcgtattattagcccgtttccggatttcagttgatcacgttgccatgtggaatgaatgtacgcctgtctctgcgattgcagccggtctgtcttgatctttttttcgtgctttccccccccgttcttgtcctatttttaggcccagctgcgttatcggtttggtattattgctataaatccgatggcaagaatagggatgttgtttttcaagattcctttcgcgcttcttctgcatagctgtaggatgtgtctgtgaccggagtgccgcgccagggaaatcctggggaattcgttagtccacatcgtaccaatggtattcatcagctcagaatccaccgagaaaggagcaattgctttcctgtgcgtatttgatggtgaaggtgatgttgtcgcctggaagactaggaggtggcgtggagttccccggggccaagttcactgacgagtcagcgaagcaccatctgggctattcctacgactaagcagcaatatcacaactttggaatggcctggatgctccttgcactgaatatcgataattatattctatctacacaatactgagtgaagcctatcggataggtacaactgcttgctgtgatggtataaaaatggtcgaatccatttagggcactctgtcatctgcatgtgcatatacgtgcataatgcatttaggtaaacagtaaacaagggaataccctttaaaggggtttcgaatagcctctcctaatggaagacaagagggaaatatatggtgcgtacctacatacatacgcttgaccacatcttgctagcaatcgttgtcctggttataagccacctctcgttcatccaacattttgctagaccggatatgttcactgaatatgaattataggttgaagatctgtggcttctcttcctccgtcatgtaagggctgcgcggctgccccgagacatatggcactcttatactaatgctctaagcacttccaaggttgatcatacccctttacccactccctcaccaagtgtatcaaccttggaagttcggctgctcccaatctgacaaatccatcgagtcagtctctacctaggtaagagatgatggttaccctcgtctatagaccggtaaccgtttctccgctgcgtttatcacggcgtcgattctcatttatatatgtatatattcatataggactattgacaagtaaccaagtacaaatccatttagttatggcgtcgaaaataatgttgatgcctaagaaggcaggcaataaatactttatgcctgacatatcaggggacggggcaacaaggccacaaccaatcaccgtcgagctgtcatccccattgaggaccctccatttccaccccgaatcagccggaagctgcgcaaggtttgttttccgcagaaaactgccagttgaacgctgcaatgccccaagatacctcttccataccaggggcttcctcctcgacaccccaggcgcctgtcgagaaaccgtccgcccctccggtcaacatcctcccctcgccgatagcccggatctactcgattgcgcacccagcactccttttgggattgggcgctactcgcttcgaagcattggtagctgatcccaccaaggagcttctttcaaccctaccatggctcacccttgttcaaattttctacgtgattgtttgtctcccgcccgctgggtcaacaccgtcaccggagacaagcacgtccgccccggctgatggcaagtcaagtccacggtcatctgggcccgttggtgctgcgcgtcatggaaaacatggaaagcggaagcagcacgccaacagctgggcgtgtatttggtcccggtcactggtacgcgatatttctccaattgagttgcaactgcgagccattggtactgacatgattttctagccggccttcctctcgctctctctgaccttcgccttggccaccccagtgctgacgatccttctggttctattcggcgctccgctcacaacacacaattctgagaccgtcctatgtgcggctcacatggccgttctgtccgcgacggccctgatctacgcccatggggtggatcgcgccgtgtggaacgaggtttggggcattgcccgtcccgctgatgcggtctggggcagtgcgctcggcacagggttgggggcgtggttcggcgctattcctattccacttgactggtgagttatacgtcctatacttcaaatgccgaatacccggctaactcgatacatgaagggaccgaccttggcaggcattcccaatcacgattctcgttggagcctacatcggatatgcccttggctctttaatttctcgtactccgttcgtttacggcaagcgtgtcaaatttacatcggaggacttgagcgatacggaaaagaagactaactaggggatctgccgtggggtccctctatattggcgcaatacggcatatttctggagatacatgcctggcttgtattagcataaaaagccctcacgcaactgccgctaccagttataatttgttttagatatccaaagaattaatttgttaatataaattccttcaatgggagcatctcgctctttatagcttgctgtgatctttgaagctgccatgtcgccctgagcctttgctgaacttcgctgcacctgcgatagcttcctgcaagatcaccttgcccccggcgttgaactcctgggacatcgcatcatggaacgaagatgcctcatacgcactgtagtagcatgactggcgatctgtgttgagacacagctcagggaacgtgatgagctgttttgctatcccaatggcttcctttagtgattctcctttaggaaccaccctgttggccagccccatagtcaacgcttcatgggcgctcacaggccgaccggtcaatatcatatccaaggcgcggccaaggccgacaatggcttgcagccggacagttcctccgtcgatcaaaggcacaccccagcgtcgacaaaagaccccaaagactgcgtcttcttcaaccacacgcatatccgcaagtaggctcagctctagacctcctgcgacggcgtatccggagatagcacatatgactggctttttagtaatgagcctggatggacccattggccccaagttgcgaccattgacaggatggaggttgtcgctgggtgtgtcattgcttgcctgtgcaacgctatggaggtcggctcctgcgcaaaagctaccaccggtacctgtgaggacacacactttctgtttcgggtcatcctcaaagacaagaatggcttcgtagagcgccttcgcagtcaagggatcgacggcattcttcctgtcagggcgattaattgcaatcaccgagatgcctgaatatgaggaagtatctagtgtcactctgacgtgttccgccatattcaaaacaagggaactatgaataggacaaaatgttgctagtcgagcgttttatagtccatgcctcggctaaaccccacttctctcgacctccaaccatcaccgtcactcggggacctaccctgtcgggcatagcgccatgtcttcagcatgtataatctgtcataaaagaaaggtgtcgcatctatcatccattggtgtgattcctagtaattgctaatagttgtaggtgaggtgtgactttgcgacgcaagacccctgcagcaactgcaaaaagtcggatctggagtgcaggtaagtacctaggtaggcccgcccaagagaagtcgaataattcaaaataattgactccatttagaccatatacgaggaagcgcaagaggttcaccaacagcctatcgccagggcggaatgtgtcaatctctgctcccttgagtcagacaccgcggacctcacaggttcctcccgggtcagcagagccgcaagtgacttcacagcagaattccttgagcgggtctcatggggtaattccaattgaaggcaatacagccgcggtcgccaataatggcgaaccgttcattaaagaagagagctatcgcggccgcagtgaatatctcggtggcagcgtcccgtttgatgaaaatatggtgaaacctggtcgtgaaactacatacaccaaccccaaagcatcagcaactgatttgcagatgcttcgcgatcagggcgcctttgagttacctccaatatcagtccagacagagctaatggccagttttgacacgcactgtgcaccctggacgccggttgtggacccgaaatggctggatgagagcgcgccgcgatcaatgctgctcctccaggctgtctttctcgctggaagcagagtctccaaagctcatctggactatgggtccagcgaagtgttttatcgacgagcaaaactacttttcttttttggtggttgtgatgaccctttgatttctattgtggccgcctgtctgctacattggtataatccggttgggcccgaggatgtctctaccgacaccagtgggttttggattcgaacagctggggcaatggcttttcagattgggctacacaaggagccctcgccgaattcccgagaccgggggctccggagaaggctgtggtggtctctcgtggtatgtatctccttgagtctgcaactcacaaagtactatgagctaaaatctttaggtgcgggacaatataatttctgttggtgtcggccgaccacgaactatcaatctacgggatagcgatgtgcttccgccatcacttaatgacttccccacgaacaacttcaaatcccaattattcttagcgtactgtaccatatccaagcttctgggagacacggtcgaatcccatctgcggcaagagatctctcggcaaaggcgggtcgatctcgagaacgccgtctaccgatgggccaaacaagtcattccaagattgcggtcatccgtcgcagctcaagacgatgcggctatttgtaacctcgaagttcaacaaatgctggtcatgtacttcgtggtgcttactattctccatcgatcgcctacaccaggtagcgtaccgcccgcagcatcgctggtcgcatcttcgtttattgctgggatttacgaggaattcctgcttcgcgatgagcttcgatacttaggccctgtctttgcattctacccactatgtgctggactgtcactcctttctagctgtcgctatacccaccttcaaggtaccgctgaacatgaattaacagtcatgaagctctcccttcaaaagctatccgaaaggtggctctcggcagtcggaccgttgcgggcactgaacaagttgaccgagaaagtccgagagctgggtcccttcgagggtccatcgccaacgctcgatccggacgcggcctctttctttgaagggttcgacacgacactttgcaaacaatggcaagccattgggcactccttggagcccagcggtgggaccacgggcattgcgtctacttgcactatggcggatattcaggaccctaatgatgcccttcggtcccttggcgctccaccggggcaacagccggatacttacgattttgcgtctcttgatgtgagtttggatccattcagtaataattgggaaggcgccggatttgactggagtggttcctggctactcaatgtatgaacacacagggctagagaattggcgttcacacaaataggtctttggttcatgtcttgtttttcattttaatgtataaaagctctttccacttcgaaatagcaccatgatctgttcatatcgcctttattatgacgtatatacttgtccctattgtctttgcatgtctttgtggaatatacccttccaaggctgagctccacagaaatttggcaccgaaacggcctttcagactgcacggcgataagcagaaatacgccttcatcagagtatatgggtcgtcgacgatatagaaactggtcgagatgtaaggagccgattcggtggttgagtatatggctgacgatccgaaacgaatacctgtagttagggcactattgtcaaattctcaacagcacgcagattatatccgggaaatgcatccatgactttgcctttggggtatacctaggtaactcccctgtgttgagcccaacaactttcaactttctctgacttcccaaccttggaacctgtcagcatgtgaccttagaagcaaccctaggtttgcttatttgctttcgactttcgacttttcatcctcttcctattttcatttcaactctacctttcctttcttctacctttccttgatttttcacttctccctctcatcgaatcaaatcatggatgatatcccgcggtcatggttccctagtggactagatgaaggcaagaaggtgactctcgataagccctcgtcctcgaaatgggtgattggcaaactagtcaatacgcataactaccaatcagacgagacgcatgttccctcctacgtctgtgctcagtttgaatgcgtcaatgctactgatcaggaagagtgctttatgcgcatttacgtccaagttccattcaccggttatgagcacgcagcccgagatacacttgcccaacaagcagctgaattcacacccccggagctaaatgcgtacaaattcctcaccgacaatgactcgcgaaatacccctaagttacgagcatataaacaagacattcaagacgccaatggaccaattcctggagggcatatcacatggatcgtatggcacaaagtgcctggaaaatgtctaggagataggagagatgccttgctttactggggcctgaaagcaactgaacgaaaacgtgtccgtgatgccttccttcgggagtttccgtgagttgaccacatttccactactaccgggtaaacttgacacgctgataataatattattagtacgatcatgaaaatgggatattcccctaatcacctcaggcctcgcaacttgatctggaatagtgttaacggtgctctgtatgcttcgtatcattcttatactcccggaagttgatgttgactaacgtatcgccgcagttactttgttggtttccgggatgcaatgcctttcaaggccaaaggaacttttggtgaagagtggttgccatattttgatcttgctaagccccctcagagaaattaccagaagtcaaaggattacaagggagacacctcgggttgggtcctttgactttttaattctcaatcaataggccatgacggctctagactatcttggcttggtgctgccagagctctgagacagagggaaacgggcggtgacaggagtgagcagtacgacttcgtctgctgttgagaactgggagcacaaggagcaaccttggaaactatgtagctacgtaatctgcaacgcactgctagcaaccaattctaacagtcgctctagtcttagcctcttactcctgtctactcgattaatgttagaatgcaaagtgttggttggatgttcatatatacagctaaatgaatcatcaaaaataccagtcaatgttacatgctatatatggcataaacgttcagcttgacttgttcaaagcttcgaacccgccttttgcaaagatcggtgaccagatgcacggttcgccggtaagtcaactccccaggcaatgcgacagtcccattgcagatgttcctcacctccagaggtagcgctagcagtgccactgactgtaacaatgtcatggaacacctgctctccaacgccaccctcagcactcaagatccagcgacgagcgatctctgctgtcacagggtcattatcgcgttcggtatcaagcgccagaagagcacccgatagaatccaagctacagtaaacataaagcgacggccatcggcgacagtcgtggcgggatcctgagtcatgaaacgagcatgcaaagccaaccatgcggctgtcagggcattccgcaaatccacgctctgaatcagggccaaggtacggtcaagccatgttccgaatatcttcaggttgtctttcttaataaggaagcggacgaactcgctggctagcacattggtagtgccctcccagatagaattgacggcattgttacgcagaatccgagagatgttgaactcgggttcgtcagcctcatccatatagccgactccacccatagattcctggcattcttgaattccagcagtagccatcttgctgataacagccttggcagtggcagtcaaggtacggaaaaccacctcggcttctttaccaggttgaggtagatgcgcgatcttattagacgacggtgttcgatcttcaacaaccccaaacaaagcaaccgtaaaccatgcaaggttcattgcgccccggtgctttacttccatgtctgcgagaagccgcaaatgcattgggattaaccagagcggttcgccgacagtagtccttgctttcgcgaagctcttcgtgatgctgatggctcggcgccaaccagcaagcgatccaacaaaggtatggagccgggtgacgttgagaagaggcgcaatagtgacgataccctggtctatttccccgatgaggtgcgcacgcatgtcctttagttccaattcggctgtcggtaattctttagtaccgagtttgttcttcagtcggtggattctgacgccattagatacaactctggagacaccatcaccgccgaccacggtccgtcgcaatggcgcaaggaacgtgcttagcttcccagatggcgttttcgcgagcaaaagagcaaggtttgcatctgttgccgaagagaagaacttgaatccgctgatgaggtagtcaccgtcacccagtggttcggagcccgaagagctagctagcggcgagtaagtagcccatgtttcagtgttttggacgtcgcttccaccggctctctcagtcatccactggcccgaggtccagtgatcatccttttcggagatcaacccctgaaacgcagtatgaaatggatgtgtagacggcagcttattgattctagacgagagaataaaagcagcaccatcggtcatgctaatcgggcaggagtacagtccagaagaaggcgagtacaaataattcctggaaccatggcatgagcgatagcatagaaaatcgacgacaaaatactcacagtgcatactgaactgttcttcgatcgactcccaaactcttatcgtagcccgccgagacgatcctaatcggatcaagttagatcatgcacgtcatctcgaaggcggcgtttataaaagatacctattccgagcaccccattttcccaattgcttccagccttctgtggttaccaacctatcataatcatatcgcttgccccaaacgttgtggctcttcacatatggtacattgcgctcggcatcggcgctccattcacgaacctgctcggaaatagcctcggcaccgaactgggtgagatgcggttgtacagattgcaatgtagcagatggtagataccctggataatgtttagagattataataagtacaataagtacagatgagtgagggactcacatgccagtgcccgctgaaggctgggatccgacgtgtaggtattctccaacggcccgggatcggtgatgtagccgctatccgctgtcgcgggctgtgaggacgacatggtgttattcttggaagtgaatttaattagaaagtgacaggcgaagcattggaatggggttgataaaagcagttgaagatgcgggggagatggacctcggccgtcggttgtctcatggaagtataaagtctcatatttgccctccgtaaaagcgccgaactgcctttagtgtcaccttattgaccctgctacatagtctggtcatagtctagtggcgagcaagagataattgtattgttaaaatatcaagacaggccttgagagactattctagctataacaagccttcatgggcatatcagcgctccatcgacagatctgactttttattcattgtttttacctcaaacggccaaagactttcacatatcgtgcagcgtgttgtatcccgtctcaaccaagctgcgcggtcctcgggcgtccgagcagacatgccagtagaaaaggccacccagctttgacgaggtcacaaattccgccttctgttttactgtttcgggggtatcatatgtgacgaaccctccatcagctccaacacagtatgatgcaccaatgttccggtcatggtactcctgtgtgcccggtcgcggcagatcgcggtagtcaaaaacgccatcctcgccgccgcttccagtataccgctgaccagggccattgctacccaggaaggatcgtccgtaaaccgggacacctaaaatgatctttctaggggacactccttgcctcatgacgtaagaaactgcagaatcaccagatatggctgagccataaagctgggcctggtggcccgtctccgattcccatggtccagcgaaatcgtaggtcatgagattgatcatgtcaagatgcttttgtgccgcagcaaggtcaatgttccgcaatgcccactggccggcagggagggcagtggtaaggacatatcgtggagcgggtaacacttcccgcaggcgtgcgaggagtcgaacataatccttcccttgtctggaatcagagggatgctcccagtcgactgcatagcagatatagtgagtcacgtgcttccaacttgcgtcaaatcaaaaagataccgcggccttactgtcaatcccatcaattccaaattgatccaccagtccccgcgcggtgcgaacgaaggtgtccaaccgagagcggctgttggctacagcggcgaagttctcacttccttttccgcctcccccaacagagaggatgaccctcatcttagagtactgttgcttcaactggacaaaagctctaagacaaccttctgcaccgtcaacgggcatctgggtgtcagcccattcatcactcagctatgacgcagcgtcaataaatattcctacatcggcgcacgcttaaacctaaacttacatagacagtaccatcatctttcaccctgcgagaaaccaatttggattagcgcgtcagccatctactcgaactcgggcctttgaacggcgatgattggctgcgttttaccaggcaaatgcgtagaacacgtgtgagataaatcccaagcgcaaagaagagggaggctcctttcgatagattctccaattcggataataggccgcgttcgtgtacaatggcacctcgtatgagacgtgggactcggccgcggggtcacgatccgcgccccgtcggcggaagagcctggaagctgagaacattgtcaagatgttaaggttagtatgaaaggtcgcgcattggatggaaccacggaaaggactgaagttgaactgaattctgaaaaaaaggacaaaggaaagaaagaagagaaagaattggattgcaagtggaaagttgcctagaacatgctgtgtgtttcctttttaggaattcgtcacgtggatcttcgccttttgttacaacataccctccccttttgcacttacaccaattaggtggactttatgatcaggcagtttgcagatgcaaatctgagctaacttgactaggctgcttggcgtggtcaaatcaacaattggacacagtaagatgcggggaatgcgggctaagcatatgcgcaccatttctttttccttttaacaaaaatatggagtacgcattggctgatgtttcgcgtcagatgggtttgcctgccaactggcaacctgcactgtctcggggttcagttacgagctgtgttggatccaaaatacacctgatcttctccggccatacggagatgacctacggtccgatctaatcagcgcagatggagtaagaatagggagaatttccactaaggcgcaagtgtggatcgacctgcatgagcaacgcaccccgtgttcgaaagattttgcgaaacggcgccagatcgccgtaaaagaaaaatattgtggacgatcatgactcgtgaaaatacgaatccagactcaagctcgtgttggtgccccggtgagcaatttattaagccaatgaccatacaagacacaggtttgacatcttgcgaatgtttgcttttttggataacaaagcgtgcatagggggtattcgattcgctgacagggagcctataatatgaggctggggcctgcacgactagaaggctccatgaaaatcgagcaaacgcccgtccgttggcaatctgtcaacctccctcctccatcctacagttgcttcactacagagggtgctgccctgggtgtcaatctcgggccaagttgacaggcaaggcttgacagtaagatttgttccgtggtcgattatcgccctgtggcggctccgtgtttgcgttgccatctggatcaactccaatttctaccgtttgccgaattggaacaaggtggcgaatacgatgagaagcttccaaaatacgtctgctacacaataggatggaagtttatactcaaccgcaaggcggtaggtagagtgaccgaagaaggtttggttgtagctcctccgatgtggtggtaagtaagccaacagcctccaacacgttacctgaaaaatatcgcccaccgagatctctggggctccggcaatactcgcatacaccaggccgacagtccaccctcaaaggcaaagtcttccgccccccacttttttgaaagcgcatctttccattcttcgatccgtatcgtttgcctcttgccatcagaactttcaaggaccatcatccccgccggcacaagttcagagggccgaagcggagtgccagtataataaaattcgtgccgaggatcgcagatgcccctaagatgggatgtcgcggacccaataccgtggtaacaccgtcgacaaatggccgtcaaagggcaagaacgacagaagtaccaatggcatatcgagttcatctcacgcttgcagtttgagcactcggcgagttggtcgattgggaatggaaaatcgtcatcctccggtctttcatttccgtcatctggaagatgccgcttcgcctgctgcagacagtccctatgccagaccttgagcaaatacaatgccccgttaagatcttcgtggctgtccgcagccaccagaaatgtcctaaagaggatcataaatgccttatcatcgttggaaggaccattgtccgacaacagctcgatagttctcttcacacgaccacggagagcttctctggcgtttgtgatatctccctggtcccgtagccaactcgagatgaccaagcagatatcactcgattcagtattttcgtccaacctcaaaagggactttgtagacaatggaacctctgggtggtaaagacacacggttgctaagcggcttcttgaccacgtctgagccgcctcgatgttccagctgtcagaattgtcgagggaagcaacctcgtaccaagcttgaattcctgttctgataaggccgtgctcgaacatcattgacccgagcaagtatttcgccactgccaggttatcggtttgagtctcccttgaggccgcagctctgcccggaatcaatgcaacaagatcaatgtgcttcccattatcccgcatcagcgcatagtgaagggcccgatatattatccggggcgcccaaatgattgccgaagtgaggaactcgatcaaatcatctttctcggtccagctaagagaaacggcaaaatcgaacacgtcttgaacacgatctgtctcgtgcagctgcagaaagagccaaaagaacgaatgtagcgtatccctgtctcggtaatcatccttttgtcccacaaatgtttcccaggcctcgtttgcggtggcaacagccttgtcagtcatttttccaaggtgctccatttgcgcagtgttcagcaatttgccgatagaatcctgccagtcacggtcccaggagttgtcgtacagcgactcggccagatcagagtgttctaatgcctccttgtaccttccgaccttcgtacatgcacgagccatatctctgtgaatcacagagagcgcttgtttccttaagaaaggcttcctatgatgttcatcgagagcgatctggaattgttcgatggctgccgcatagttatgattcaggaggatcgcctgagcgagccgggcatgccatatgggcgttttctcgagatgctgtatctccgcggtatgcagtatcttgcgaggctccagaccgggcactaacaccgtaagcttcccatccgaggttggcccggtggctgccatttgagagtacacaaataacatggaggaaagaacccctggtaatccatcctcctctttgatatcttccggaaccagccaaagtcgggagaaactctctgccaaacgagaaaaaagcaccgtgaaaggacaggcgtcgcttgccaccgtcgaagaccgagcacaatcctgcaagagctgtttcgcatccggggagagccaatttagtaccaactctgccctcttgttcgccgtatcacgatctcgagcatcccaccagtaacgggcgatctctgtcgggtgggacgacgggtagaagaggtatatagaaaggcgattcacgcggcaattttcaatgagccagtgctggggctggaataccggctcctcggtgaagagggcggcaagcagagtggctattgcttctcttcgatttgctgctttcgctgggtttgcacgcgataggtgcagcggcaggaatttctgggcatatctatttactggccctagccacctctttgatacgggcgcgaagtttctttggagagcgtagagtaagacaaatacaacggacgcttcagctcggtcggggtcgatctgaatgggtctagcctccacaggtttgctgaagaattcgtaaaaggaactatgacgcagagttacaatgaccgcgtctttgtcttcttcttcctcatccccagcgggccggagcgaaaacagggatgagtataccgtgcgaaggtcgtcctcaagattcaggacctcctctccaagaatgacctccaagataaggtcgagctgctcgacagtcagcggcttctgagccttcgacacaaatgaaagtaagatgtcaagctgttgaatctgtgtccccgtcgcttcctcggctaatccttcctcatcggacagctcatcgggcaattcattcgtcatcgcatccgaggccgacaactctctagctaggcgctctagctccgcatgcagcattgcgctgattcctcggggcatcgtccgcactgccttccgaatctgctcctttgtccgacagcgcagaacagatttgatgacaaggttggcccattcccaaaggccttctgcttgcccccctatctcccggacgacctcggcttgaaagtctggagaaccgcgaaacaacttggtcttctgcagcttctgagagacatagttggaaaggtcgtccttgttcttttcactagtgatttcgatttcgggaatccacccaagggagtgttcgtcgaggatgccgcgcaccgagtttctgcccaaaagtacgactcggattggtggggtgcccatccggtcctctgttgcgtacgtcctctccagtaggctgaaaaggatctcttgttcctctgggtcggcctcatcgataccgtcaatgataaagcaaatgctgcggtccggtggagactcgacgaagtagtcgagcaagagtttcctccagacaacgtggctgttggctgggtcttctttcagacagaactcttcgacatgcgccgcgaagcccagtcgctggacaacggcttgccatgccagcgtccgcagcgctttgttaaaggatcgcagatccaaatcgttgctcttgaagaagaaagaagcgacaatgggtgcagatggggcagccgggtctgccgtcgcgaaatcgctgatgattttggacgccacatacgacttaccgacaccagggccgccgtgaatccagaggagaggctcggatccatgccaccaggaccggatcctatcttcaatccagctccccgatctaggtatccgattctcgttgatcgcggagaagacgcggccggatgcagagacgggatctaatgccttcttcactctgtcaagtctctcacggtcatttgtgttgccgtctcgttcgagtaattttgctgtatttctaagcgcctgatgagtgagatcgagcccgtgagcggagaccatcttgtgttcctggctcgtcaactcctccagctcgcccaggagcgagctaatcgacgtatcttcaaccaagatgttctttgtccattttgtaagtcttgctctaagcgacccacgactaagtaatttctgcgaaaccgcgcagacgcgaaggaaattaaccagaacactgacaatgattgtcttcatcccttcgctgagagggacaccactgtatgagttcagacggagagcgaaatggccaagtttgtgaaacaactccataagcatgtcaaaagattcactgaccctgcgagcacctcgaatcagaagcatcatagcgcccatgatggaaccggctggtggaaaagctgcggcggctgcacccgcaatcagatcgccccagttctcaaagggcaccaggaccatctgcatagcttggaagagcgggcgtttctgcgtccggaagtcttcaaaatggtccttctccgcgtctaactgacgggacagatcctcgggaccgcggaccttagggaagtcgccatcggtaagcgcaattcccgtttctttagcatagtcgtcacaggcagaatgccagagtgcggacagcttgctatccgaaacgtcacttgttgttcgagtcatcgtgatttggcgcccagacaggaggggcagtgaggttgaatattcatgctctgacagagtctggcatgatgcccctcatttcatgcagtaaaacttcattttcaggactagcttgtgccacgtcattttgggcctacggcgtgcatcggcaagcgtccctcagttaacctgacgttgttgttagccacctgggcaacttctgttgcttcatccgccaggtttttttcgatcctatctcttatcgctgttacttctctccacgctctattctgattgctcctgtaggctttatctaggcctaattccaataggttccaataggttccaataggtttcaatgggtagactatgttactgccctcctataggccagcccattatgtatacaagataccacaaaaagaccacctagaactacataaattatgtaactagtcatgtcaaagtcacgcttttacgacttaatgggaatttcaatggggtggggtttgtgggttttggcgcagcctattcggaaggtgatcgtatactcgaatagacacactattaagaaactaccctcccgtgagcctttctattagagataacagtaaagtatttatacccatcgcatctatctatagacgtcgctattaacgctgcaataggtaaatagctcgaagtattaacaaaggcggcgctagtatccgttatacactttctctagcgacgtttaaaaagtctaatcgaaaaagtttatatagatcgcttcatcctctaaaagaagatagtctatataatcctcgttcatttaaatgcaatgtctagactttcccggtcaagtaagaactcactttcgctaataacgttcggccaagggaaaataccaaaataacgaatcacaacacactaagctacctactcggaggcctaataaacaccaccatctcaaccctcccgagattcttgaggttcttgaggttcttggctgctcaactattccgccgacaaaaggagtgtaattgtggaccatattatgaagaagatcggtgaacataggatctcatcgtgtctactatggttagtatcgtcggccgtgttgacaagcaagacctacagctattagaagtgtctacaatatatagtaagcttatagggatgcccaaaacaggcataacgtagtgtattatctcgaagtacgtcctattccgaatacacaccttcgatatcttcatgcgacattagagcttaacagccttgttcagttcggcccatttcttctctccttcagactcaggttccggaggcaccaggccattcatcttccacaagtctctagatgcttccgcgatgaaatactcccaatccattcccttcggctcaaatactggattgaggattccgtcgacatcagccaggaatcgccgtttggcttcgtcgctcttaaaggcacgggcgacgtgataaattgtcaccgctgcaaagctggcatgaggctcgcccccaacgaatgcagtaccgggaatgtcctcagagaagtggacttggacgtagaatgcaggtaggccacgtgagacgtacaagctggtgattgacttggcgagttgttctttttcggcagccgtaatggtgtttgggctatgtttgatgtcccaggtaggcattgtgaaggcaggttcttgtgagaacaatttgtagggaatgatttcgaagtgaataatagctagatatgttttaatctacttcacatactggattctgtccattcttatactgcgctgaagatcataaggtccaagatacctaggtacctacctaggtagaccttggagattagcatatcaaagtgtctcgtgcgatcgcccatatacatgagcaccttttctcgatctcgcacagccttgaggcccacgggtatcgggaagatagtgtaatagaaaaacccggactacaatagcgggtccacttgtgccactaagcttttttgatcatttcatcagccttgggccttgattactataccgtacaacgccccgatcttcatagtagtaaacctaatgattactcgggttgtatattagatcactcgggataatactcagaatatgacgacatcgagtatgtcggtgtgtcatggcgatgaggcttccaaggtttctttggaaccggacggggggtagaacgtgggttccgaggcccatcattttgattaccctaacctattgagtacccgtggacatccaggtaaagattgggcaaattgaatcagctagtagattacaaattcaaatgacgaatataaaagacagctgatcgcagtacagaatgctttctccccattaacactcaagtaaccaacatgtccaatgaattgatctttatcaccggagccactggcttcattgggagtgccactgcagtggaagctctcaaggccggatatcgactgcgagtttgtcttcgaaggccatcggagcaattacaaactctgctgtcagactatagtgacaaggttgaatttgttatcattccagacatcactgacgaggcggcattcgatggcaagttgaacggcgtggactacgtccttcatctcgcatcccctcttgcccaagggactgacaagcaatcatactttgcccctgctcggaaagggaccactgctatactgaaagcagcagcgaaggtcccgaccgtcaagaaagtcgtggttacctcctccattgctgctttgatcccaatgtcgggcattcctactggtggtgtggtaaaaggtaatttatatcccgctttttgatttgcgagtaagaattatattgacgcatctcctagaggaaaacgactgggacttttcggttgatgaaaatgggaatttcgaggaccctcaaaacccggccgcaacacagatgaagctgtatcaggcctccaagcttctcgcaaacaacgcaacatggaagtttagggagacagccaagccacactatgcattggtgacgctgcaccccgggttcgtgtacgggcacaatctggttcagagttctgccgaccaagtcaacgccgggtccaacggccttctatggaatatcatcatgaagggtgatcccagcgggaatttggtaggagtgcacattcaagatgtggccgaagcgcacatcaaagcattggatccgaagatcgtggatggctcgaaatatctactggttgggccgaagacaacgggagccgagattacgcgtattgtgcacaaacactatccagattctggagcgtcaatctccgaggatttccagggtgtctcgttccccgttgatacgactaaggcggagacagagcttgggattcaatggcgctcatttgaggcgatggtgcgggatctgatggaccagcagctcgggtttgtgtagacaagtctgtcaaagtaggtgcttatagaccgattaatatagtgcaatatgtcagtagtaacctcaatatgaaataaacagcaattggattggatgttgaagtttagttctctgaggtcctgaatgttctggtttccatattcctcgtctccctttcggcgtgtgaacatatattttcctcgaaacgaatagcataatgtttcgagtattaaacagaaacttgtttccgatgtgctaagttgtaaacatttagttaactagtatgattgttcatagtttgaattggatatcaaaatgcaaaccagccaaacactactttgccacctgatttctaaggcgacaaccgaagaacaacctggacagctccgcaaccttcaacgaccaaacttattcctcagattccttttctccagaccaaatttgagctgaaatacccctagagtctaccattggatctcttttcaaaacttgcaatttcatccacaaagaggtgcatactcagccacatacacgcatctgactcgggacgaccaccgatcctctctttaccctcaacgcttcacctgagcttcatcgagccatggctaccgataccgacactgaaagcgcagctgcgcacatcatatctgctgaaccgacgcgcgatcccagctacaacgagtttactttcacaccatttctgcgcaagagcttcggcttcggactcgccagcgatgtacctgtctgcaaagcttatagtgaagggcactgcccattaggaccggcttgcccagatcgtcatcccactccgtcccgtgtgaccacctcgactacgacagcatctggaatggcgccatctacaacacatggatcgctggtttgcaaacatttcctcaagggactatgcaagaaaggactgaaatgtgaatacctccacgaatataaccttcgacgaatgccggaatgccagtcattctcgcgatccggatactgcaccaatggtgatgattgcctttaccagcacgtccgcgaagaggcacgcctgccgccttgcgagcactacgaccgtggatattgcgaattgggaccactatgtgcaaagcgacacgtccgccggcgcctatgtgccttctatctggccggattctgccctgatggaaaagcgtgtgccaatgcccaccctcgctggccggaaaacctaccacggcctacaatgcgcactgaaaagacggaggaagaacttgagcgcgaacgagtcctcatccgcgaagaacaagaacgggaaaaagaacgggaacgagaatggcgaaacgaacgtggtcggggtggtggatttgggcgtggccgcttccgcggacgtggaaggggttaggtggattcttatcgcaggggtctttttttatggcgacattgcatggcatggagtgaggtgtggcttcggcaaggggtccacgggcttctcggtttcttttcatttatggtttttgcgctagtcccgcgataccccattgagtttgacgcaaaaaaacattcacaagaattcttttctcctttcacttgggctcaattgcatagctcgtgttacaagggcgacatccctgttccacccttgctgtatcatatctgccgtctgctacactggcttcacctgacaataattaatagacctgcagtgccgtgaaaccatatgctttttcgtgttaatactcagccaccggaactaaatgtgccgatctaactcctatggtggattgagcgttctgtcgcaaacgtaggaagaaattaggtattataagccaatccatgacgtcatgataggcactctcatagatggtctatatcctcttaattccgttgtttactaagagcagttctcttgctgttgaatctagacaatttaatatttttactaatggtttggtaactcaactaggcgcacagtagggtacgctcacccttggcacgtaagattttcatttgtcagttctcagtaagaatcactctatatccgagtggaacctcttgggccaatcatattccatccttgctctgtcatcgatgactgatagctcttgtgaagctctgttgcgctcgctaatcatagaggtacttaaaacacatactaattaatatggtggaggaggtacccaggacattccccccggcggggtggtaccctttataaataacccccctccccgctctttctctctcaactttccctctacatcgttcactctacactcaaatcaatcataatggctcccaagattgcaattgtctacgtacgtcttccaatggcaacgcattcctctcagatctcactaactgtccgattagtactccatgtacggccacatcaaggccttggccgaggccgagaagaagggcattgagtccgctggtggtcaagccgagatcttccagtcagttatccccattattgttgcccttcacacgtcactttattaacgtttgagtgtctaggatcgccgagaccctcaacgaggaagtcttgggcaagatgcacgctcctgccaaggctagctaccccgttgttgagcccgccgacctcctcgccttcgacgctgttctgttcggtatccccacccgttacggtaacttccctgctcagtggaagaccttctgggacaagaccggtggtatttgggccaccggtggcttctggggaaagtacgccggtctcttcgtgtcgaccggtactcagggtggtggtcaggagtcgactgcccttgcctcgatgagcactctcgcccaccacggcttcatctacgttcctctgggctacaagaccgtcttcgcccagctgagcaacctggacgaggttcacggtggtagcgcctggggtgctggtaccttcgctgtaagttaaaacgacacactccgatacattttcccttgctgaccatcccgtctacagggtgccgatggttcccgtcagccctccgcccttgagctcgaggttgccaccgctcagggcaaggccttctacgagactgtttccaaggtccagtgactgcatgatggtaccgagtcgaagccggagagctcgacccctgttactggggcggccgctcgaaagaccgagcagcctcccaaggagcagcagggtgctcaggagccagccaagaaggaaaagagcagtgaggggccatgcggcttgcctaagaaatgtaccattctttgattgggcccatgtctcttcttgtgtcctccaattttcggctgttctcccggggcgttctcttaggcgtttcgaattcttatgattttacagacataccatattcgtttctcgattccaactatatctagcctaatggaagaaatttttggaagatgattgtcaattgctttttaactgtagatgttcaactttccagttccacaaatgttacatgtgcatggtttacctacgtaccttccatgatgattatgtcgtagtatcctccagcccactgagcatatttctgcctcatttgcatacattctaccacaattcatttccaacaccggtactaaactaggaactgctggttgtcacttccagggttcctctcagaattatttattcataagtgcatgttgtatacaggctctggctctccatcttaaagctctgtatctgtggtaacgactttaccgacgccacgcccaaaactccaccgccgaccgcggggtgttccgtcaggcagataccataccgcccgccagctgtgacgtgaccaaggaagcttcgagtcaagctcacttgcatgtgtcttctttgtcttcttcttccactagttttcctcggaaagtgaagccactgccacttcaccttttcttcaacagtgctttagccttctcggggctaagatggcctccattcttctgcgattcgagagtcgagacggccaatttcgactaacggtcagcccgcaggaactcttcccatcacttcaggaaaaggtatttgtcggcccttcctcagaagggaacgatagcagttcgacagcgaaaatctaatccggtaaccgccatcagattttaggacacctcccgtcaaatgtcgaaccttcgtccattgccctctcaaataaaccgatcggcacaggtggtgaggagagactactagagagcctacaaggagtttcccttcagcaggttggcctcaagtaagtgccaagtaccatattaacctttacagaatgaattactcacgcgccgctgatttgaaggcatggcgataagctctttattgggtaccaggagcagacacaacagaatggaccctcgaacggcgacacatctaccactacagaacaccgacttaatggagcaccgatccccaaggagcagatagttccgatccgtccacaaccaagttcctccactccaatcaagaacccgtgggagctggtgcagcagtcaccgctagacaatctactagacaagaaagatggaaagatcaagcgcggcatggaccagaagatgtgcaggcatggtccgcgagggatgtgtgattactgcatgccgctcgagccttacgatgcgaacaacatggcagagaagaaaatcaagcacctttctttccactcatacctgcggaaaatcaatgccgcaaccaacaagcctgaaatgggaacctcgtttatgcctcctctcaacgaaccatattaccgagtgcgaaccgactgcccatcgggacattcgccttggccggagggcatttgcaccaaatgtcaaccaagtgcaatcagtctgcaaccccaggaattccgcatggtagaccatgtggagttctcatctcctgatttaatcaattccctccttaatttctggcgaaagtctggtgctcaacggctgggttttttgtatgggacgtatgaggagtacgcggaagtaccactgggtgtgaaggctgtcgtggaagcaatctacgagcccccgcaaacgggcgaaatcgatggcgtaacactccatgactggcataacgaaaaggaagtggacgaggtagcccgtctgtgcggattgcagaaggttggtgtcatatttactgacttgattgatgccggccgtggggatggttcagttgtttgcaagcgacacatcgactcatactacttgtcttcactcgaaatcgccttcgctgcacgactccaggcacaaaatcccaagtcaacgaaatggagccggacaggacagttcggctcggatttcgtaacatgtgtgctcagcggagacgaggcaggtgcgatttctgtcagctcgtaccaagcatccgtgtctgcagttgagatggttcggggagatatcgtcgagccctcagctgacccgaccgtgatgttggtgcaatcagagcatgacgaagatctcggaagcaggacacgatacatccccgaagtcttctaccggcggattaatgagtacggtgcgagcgttcaggaaagcgcggagccgagtttcccggtcgatttcctactagtcaccctcacccacggattcccaacagagtcatccccgttattcaccgacagtcgcttccctatcgagaaccgcgaagtcatcggcgagagccaagagcttcgacacgttgcccaaaaactcatgtcccacggtgatcccgataaagctatccaaggcgtttccgacttccacatcctatgcttcttgcatggagtcggtacattcagcaaggtcagtgttttgtgtgcatcttttaatctaagcgtacgtgacactaactgtcttcttcaacaggatgaggagtcactcctctgccgcgtcgccagaacgaaatccgccgtcgagggcatgcagcttgtgaatacccctggatgggccacgttgatgacaatccttcaagagagtggtgagcgcccccctaagcgcccctggcccacaccggccgagtcttctcgctcggattcccaaacccggaaacgccgcaaccccccatcctccatcttaccccggtccatatctcccagttccgagagtgaccagcttgctaagaggtttaagggagctagtttagagtaacgggtttcgccttttcgccgttcggttttcatcgcactccccctacacccttcggttcagcttttcccacccgtgttgccccaaaaagttacagggaggcactagtgactgttcattgccttctttccgagttatggatgattcccggacccgagatggagattcgttgctgagaatggaagtcagaaagtccttgggttcgtcggctggttatagcaggttaaagctctgcacgatatcactgcatttccgacgatacagtcgaaatttggtttgcgtctcacgcgtctcacggcccttgactgtgctgtaattagataattcactggtgctcttgtctcagagcttgtctaatcctgatctgcgtaacataaatatcaagtagaggtctttcgatatgaatgcgtccaggtcgacgctacaggtggataccacgatgggctatggaaatgcacgtaggtatgccaaagcagtcgagggatattcaaatgttctcgagcagagtaggcccatatcttactccgtccaacagactgggactacgcattactcttagcgcctctggagacacatcaccacccaatttcacttcactttaagacgaatatccgttgtaattcgcttcggctggaaatccataacacttgaacacttcacaagaacctcccttccagtctttccagagctcacttactggcttgtggttccagcaaatgatataggtattgaagcccctgctcgactcctcagaaggatcaatacttaatttcacacaccctacagaaggatcagctataaagcaagacaacgctccagaagcagaccatattatggctgaagataatactcagccaagcaacagtccacgggtggctatctctcctaactacggaatctcaaaaggcaattatatcggtgccgttagtcgcggtaccgtcgcaataggcaattgggggcctatgtatagaggaccaacgaggcaaggattggcgtgcttacctatgctatattctccccccttggtatgagcgagagttccttactgtcttatgtatctggatactgcagtagctagttaatttcttctgacgcactgagatttgcctatatttgttgcaatctgtgtcttacagaatccaatcccgctactccctacactttctatggacaaggctatattccatggggtgaaaatgcgcgtgggtaaatacttagtcgcatggtctgtagtgcacaatcatgacaaatttcctgactcctacagtgttgcactgcccataaatgcccgaatagagatgtcaactccccaaggagccagtggtgatgacccccttttgactcttatgcctgactttttgaaacaagctccttcaaacgtctctccaatatctctcgtccctgtccggtattccatacttcatgaggtgcatcgtcagcaatatcccaagacaaaaggttatctgtaatatgagacagatcctcctgccgctcttcccactgagaattcttgcggacttcttgcccagagctcacaaccactacaggagcatgacccatctcgatatggcgagaagactgcatctcagcagcagtcatggtgacagccacgaggctttcctgtagctttgctttgatgtatttcccagactggtaagccgcacgtcccataacgcggtcctggcgagaacggccgcgcaaaagggcacccgcaagccgatctaatcccaacggagaaacgataccacgaagccagagcaaaaatccacgaccaggtcgcccaatgtcccccaggtatgcctcatggaggggatcgatcatgaagatgccgcgaacttcgagaagattgcgactggcaaacagcctcgaatgaagactgccaaccccagcggaaacaactatccacggaccggtctcgccggcaagagctagggcctctgctagcacgtctgctgacatgcccgcggaatgcggcgagggggcgttgtcggaccacccgaagcccggtcggtcccaataacagtatctgtcgataccgccacggctgtatacatcgtcgatgaagggttggagtgtatgttcgacgggcccatcgccaccctccagaagaatcgtcggtgcattgtcgtctgcagttttgttcccgacacaagcaagatgaacttgataggtattgccgtgcaccgagtatcgctcgcctggaggcttgagcccggcgtcgaaagcacgcaagataagagtcgctgtgaacatgacagccgcgatcgccatggcagccagtaaaatagtctcagcgagaacagcactccactccagcagggagcgtcgagtctcttctcgaccggtaagacgctcttcctcttctcgcttaccccaagcaactgctctgttctggagagcctgatagatggagatcagagctacccagacgacggaagcaatccccacccaaccctcttcgagacggatccgcggtacagcgaggataataaacatatccaccaaaagcagagcggcaagtgtaatggcccatattgtcatggacttggatggcacggcaaagaacaagagtccaaagatgaggtatcctgtcgccaaggtggtatatgcgaaggcaaaaaagcccgatccccgcgggtggatcatcggtggactaacgaatatggagaccagcaggaatgtccaccatatgaagctcagtgccaatgcgacgagtgacacgccgcgcaccgcgcgcacgctccatagattgtagggggatacctggttctcgtgttagctataacttgtctttggcgtgtgatttgtggagtgtttctgtttattgactcactgcaggatcatctgggcttaggaatccttcgttcctatctgcaggaagcagtcttgagcgctcagtaggttcttcggatctttgttctgggacgtgtcgatcttcttccccattttggcgttcgggtggccccgtggacttgcgaccccagagtggcatggtgaagattgtgtcgaactttgatttggcagatttcacataagttaattaattcgcgagtgatgtatgtttgaagaactaaaccaacgccacgcttggtagtatccgagctgttgggtatgacatcatgcatttcttacgggcagttcccggttaacgcagatatagatcttggatatttaagtagcacagtcatttgctactttcttacctttctgtctatttatttacaagaatacacgaatgacatcaggggattacctccaaaagacagactagaaaagagaccatggtgaaatgccgctttggaggtggctagaggtggacataacatcttctatctaatactttgctgtcttcgaaagttccgctaatcgcatatattgggaattttcttatgttcgatgctaattccttcaaggacttgagtaaggcagcccggagaaactagcaataatcaccccgtttaaccatatcttacactgccggagccatctgcaaaccagtcctccgcagccaaggactcatcaggagaagcatagtttatgattgtgcttttcgatgtcgtgtatgcattgtaagcctcgatcccgttctcgcttccaactccactcgcagactttgcacctccccatggactgctagggtcatttctatgatgggtattcacccaagtaattcctgcatcaatctgctcagagactcggaaagcctgggaaagatcgagtgtccatacaccggctcctaatccaaactcggtatcattcgccaacgtaattgcttcttcctctgtatcgaaaccagcaacgacaataacaggaccgaaggcctcttcgcgccagatggatgtcttcacaatactgtttctttctttgctggatgtaagcagcgtcggttcgtagaagtatcccttctcgaagttaaatccgtcaagcgggctctgagaaaccatccgctttgcaccgatgagagagaccgcatttcctccatctagagcgccgttgactaggcgttccacatttcgcagctgcttctcggagataagtggtcccatggttgattcagggttgctcggggccccaattcggcgcgtaatgctctcgatcttggccttgagcttttgcagtagctcgtccataatcgagttttgcactataatccgggtgctggccacacacgtctgtccacttgcaatgaagcttgcaaagacgattccgttgatcgccatatcgatgttggccttctcaaatacgatcaaaggcgcctttccgcctaactcggctgtgtatttcgccagattgccaccaacaatcctcccaattgccctcccggcctcggttccaccggtcacatccacctttctcaccaagggatgctcaaccagtgctttgccggtggtagctccatagccaggtaagacgctcaacacgccatccggaatccccgcctcgcggaggattttgcccaacaaaagagtcgtcaatggagtcagctcgctaggcttaattatgacactgtttccagcggcaagcgctggagcaagctttttcactgcgatcagcaacgggtggttaaacggggtgatttgaacgaccactccgagaggcactcggtcgacaaagttatgcagtttacccatcgtcgggagaacagaccgttcctcgactcgtaatagggaggcatagtatttgaaccatcttgtcaaagacgggacctgggcattcatttcccgaatgacccgacccgtctgcttcgactctgttgtgatgagctgcggaagggcatcggagagaagcactgcgcatttgtctagcacatcggcgcgatggtgacgactcgcgcgcgaccatacgccggacctgtatgctgcgtgggcggcagagacggcggcctcgacgtcttctggcgaggctgcgtcacatctgtcaatggttaggctggggtcaaaagcttttgcgacttagcttactgggcaaagatctccccggttgctggatcttcgatgggaatgctggagacttgtcagtgatagttcgagtatcaggatagccgttacccacaggtctgcattcccattttgctctttgccagccaaccacaagcgatattccataatagaaaatattcaggaaggcaaaaacgtcaaaagcccctcgaaatcgagcgcagtgacccccaggtgctttataaattgcgcttatctggcttatctccctgaagagggggaaatgcccaggtgaggggtcaagcttggagtaacattcgatcttccgactttccctttctggatgcctcctgtcctgtcaaggaaatagattgaatcgatcacgctcgaaagactgatgtactggggagtgggccatgtcgatcccttcttaatcaaattggaatgtcgtgacctgcactattttcatcttcaaaaacccccaccatgtatactgaggataatacatcggtaaacaaagctgttaaggcactctcccagcctgtcgggatcagaccagaacatatcgccgaggaagaaactctcctctacctaaaacctaaatacgaccaccgttcgcccaatgaatatacgatcaagaggtattgggacgactcaacagtgttcacagtcactggccacaaatatggtgacactccggctcgtgaatttcgcgattcatcagggctcccaatgttccagtctcgcgaggcagtcttagcatggaaaagacccctgcgggtacgactacccggcaaacaagacgaggaacttgtggatttcagggtcgacatgaaaaaggtttatcgactcacatttcgcaactcaatggagccggactcgaaaagtgagagcgaaagaatggcgacggtcgaagtccgagagtcgggcacttacgcgtggcaaggattttcagccagtattggcggccagaaagtggttgatgttcgtgagagcatgacgatgaataagacgctacccaaatgtacctctcaaggagatgtgtctctaatgccacgacaagtgcttgaaattcttgttgctgaagggtttgacttgtcgctagtgggtgtatctcattctggttggagacaaacactaactgtctttaggctgcacttattgccgtttacatggcagatacgaggttcagtactgcacctcctcctcgatgttgagcgaatacagagagatgtagatattacagttgaactgtctcaaactgttcttttatgcaatgaaaggtacatatacaatgttgtgaaaggcgtcttgtcatagtatactaattaccgtatctcgctgcctacatacgtacatgtacaactgactcttagatattgcacatgtgttccggtgcttatgctcgccgtagagtcccttttatgtatggattggccaatcacttctccagattcactcctcttagatactcaaatgcataatgattagggttattgttaaatgttgactgggatatggcccccattaggccatatacattaaccttgatttttgtgttggttcggaaactgaagaacgtctcctttctgtggagtgtctcaatctcgaaatccactgctgccatgaattctctggcaaaaggatgcttttcaaattcataccgctctgcagctcggggggaagctgttggcatgcatgcatacatgcgatgtgtgcagggtatgcgtttgtctctgtgcaaactgagcatttgcctagtttgtctcgtttgtcattcccggaggcttcatatacagccttctttccttagattcacatcacattttttccctccttcatccccctgctagcatgtagcctcaagggaagctgatctatgtgcggcttcctcggtttctgcttagtgccgaatctctcattgatgcatgctccgaatgcatgcacaacagctggtggatattcctcttccaatgtgaggtgagctgcatagtctagatctagccttggtctccgaaatctggatcctgaaatgatatttgctgtgtcactctcccccccccccccaaatcgcgacaagtagacagatatgtccctacccaacgattctaaaagctgccgctgcaggtagtctactctgtttctcgccggagcttctattatcttacgcaaagtcgcttcagaggtttgattgcggcagcatttttgtcgattggtggtctcttcnnnnnnnnnnnnnnnnnnnnnnnnnnnnnnnnnnnnnnnnnnnnnnnnnnnnnnnnnnnnnnnnnnnnnnnnnnnnnnnnnnnnnnnnnnnnnnnnnnnnccccccccccccccccaacaagtctcggcagacggcatggtggatgacgggactggcaatgagctatctcttgtctcactttgctctcactctcactttgctctcacttccagtctcactggctgtctcccgcgcggtgtcacctgcatgctcagatctcggggtatgtgatgctacagatgatgaaaaccgggctcataaaaactgttggaataaaatacggcattattccactacaccaaccccaaacccaaggttattgtatatggcctaatgggggccatatccagtctgaaattatatggcgttgtctgaaaagactggttaaatgagaacgttggcaactttggaactatataggacgccgagccttttctatagctgtggttggtgctttgcgcactgcgatccctgattccctttatttacattattctctcgaaaacactccctcgaagacactccctcgaagacactccctcgaagacactccctcgaagacactccctcgaagacactccctcgaagacactccctcgaagacagaccctcgaagacagaccctcgaagacttcttagtttttctgcgcccatctaccttgttgggactaagcatcaacatcaattccaacccacacaatcaatcctgacccttgcaaccaaacgcaacatgacgttcaacgatcccaagctccccccaaaccgaggatgagcaacttttcaaccagctcttgaccaagctacacactgaagaagaattaaagaagcatcacttcactatgatttcaacctacattcgtgatcgctggggtcgccccgcggtcggagtgatcagatgtaacaaggtcaccccaaccccagagcacaaggaagacgcaccaaagcgacaggccatcgtcctcgattgtgaaatggtcaccgttggaggtaaccggaaatagctggcatttctagtggttgcggacatgttcacgggagacatccttatcaaccacttcgtcaatcccaccagcatcgttcgaaactggcaaaccaagtacagcggcataatctgcgccgccatgaaggctgccgtggaggggaacatcaccattcgagggtggaaagcagcacgtaccgtgctttttggtcatatagacagcaagaccacaatgacttgaacaccccacggttagacacatcgatcctcaccgctgatgcggtgtacaggccgcttgaaaggccctttcggcggacttggaagctcaagactttggcagacgaactagtcggccaaaagatccagggaggaaaacgtgaccacagtgcgctggaggataccatggccactagggaggtgctactctattgcaccagaaaccctcttggattggaggcgtgggctgagaaagctcgaagccaggaaccagccaagtgtgagccggaaacgactgagcctgagtctctagaggaatggttttcaagacgttgactagttacatctcttccgcgaggtttctgtcggtgtcttttgttcaagttttgttcgcgactttcgaattaaatgcaacagatcaaagttttcaatttcgggtctcaatgctcagcggatcaataacattccaagtaatgctatgaagccaaatgctctgtgtaatcctattgttcaggtatctccaagataaactgcagtgctagcgtagagacttctcaaatacatggtaaagctggactatccatcacacgcgttcttagaggtagggctgagccagcgaatttctttctgccatcatagccctcaagccttctctgctagtatcgagatcgaattcgtctttgaagtactgtttcaggccttcggacatacgtagcttctcttgcgcttggtcttggaacctgtacaaatcatggtgtatctgtcgcgggacttcgggtcgtttagcatggcgttcgataccagcagagcattcattgctgcatgcgggcaaaccaaattcacccagccatctccagtcgggaccatacagggaaccgcaaaattcacatcggatatccaggtgcaatatttgggccctgcatatcggtaggtagtgttgattgctaagaagcatcgagcactgctggcaaagtgatccttcgaaaatgtcgttccagcaaggctgtgtcgtttttccataggtgggcatcccacaccaacaacatttgaaattttttccctttctgttaggatattttggagggtgccccagatacgttaggtagcttcctcacgcatctcacgctgtgcagctgacgcctgcttcttcctataatgttttctggaatgcaattctccatcctcaagatcttccagatcttcccagacaagttgtttcaagatttagttcacgatcagggcattatccgcctcggacccaagatcgcaggattctacgctctggccttggggtggcggtttgcgaaacaatgagaagaatgtaaaaaccgaggtctatagaagatactgggctacagttatcgagcaagagagaggggtagagaaagacgaatagcaagatgattcaaagtactaaaagatgttatttataccttgcaaatagcaaacaagatgctcagtctgccaggaaataaaagccttgtagaatcagacaatagggagaatcgatcatctcaacagaaatgattgagatggagtggtggttttgacgcgggatgaaggatctaggatgcgtgtcgatatgatgaaagcattgtttgtaatggagtggcttcaggcacattgggaaattccagctgtgagaaaacaaataaagccagaacatcaaacggcttgggagtctcacggctcctagtaggatgctctatgtcgcgcacattaactacgggtatatagaatgccttcaatgatcacctgccaccttaggcaaattaataacctatcgtgagtcacacatatataactgactactattaggaactcagctgcattctttaattatgccccgaacgcttgttgtgtccctaactactcttgtacatgcttcagttcaagcgagtgccgggacaggatatccctaaaatatagcaagtatgacattaggcggcctcccggggtagttataggtgtgctcagctacctagctatactcaagactacatatatattcatgtaaaggtcacggcgacccagaataactgcagagtaactgcgcaatttgcaccaatagcgacgctagttgaccagtaacgagcttatgctatgaaactagaaactaacctcctcgctattgctgtttctaatggaatgtttctctagaaatgatgtcgcatgaacagtagaagagtacctatatatggtcaaccctgacctatggaacattttaattcctccgggtttttactaagtccgtcgtatacataggtatgcttaagattgtgttatcttagggtcaagccttcatgattaagggaggtgggagtagttgcgaaacttaatttaatctttgatatggttatatacttttagagtagagatatataggaaagtaggccctgaaatataatttctttgcaaatgataggtagaggacaactgcgatgtacatatttcatggttgcaagcgtcttgtattttccctttgtatgtttgtattcctggttccattggttgaggcgaaaactgttattaacatatcgtgctttcagagaatgaagcatgtggatatatatgttggaggtaacagatatataggtacgaggcaaagatatacccctctattcccaccaaaactgaccaactttgaaacctcttctcttaatgagtttatattgtgacacattgttatttttatctaatattatttaccatttcaaacctaaggtaatatattatcagttatatcagtaagtattctggatagggagttgtcaattttctgagtttgacaaaagattctaatcgcgagtttagtacgggagccactatatataatggaagttcatcttgacatttggactttgatcagttaccactcaatagccatacatattggaccattcagaaagaaatattttcctaatctgattaaaagttaactgaaaattattactatataggttcattgaaagaatagggttcaatgttagtcagttttggtgggaagtcaatggcgaactataatacatagatcgtctccctatgtataacctgtgcgaaaaccagagataatcacatcatgaatatttctggatatccatcgatctaaaacatagtgtgtaatatacccgtggacatatgatgcgataaatgtagaaactgcccggaacattgtatgaacatcctatgagcgttctgagaacactctgtgaatattcaatgaatactctatgaacatcctgagaacatcctgagaacatcctgagaacatcctgagaacatcctgagaacatcctgagaacatcctgagaacatcctgagaacatcctgagaccattcaatgaacatttaagaacatttcgtgtagcgtcgtgttccgtgaacaaccaagcctttcaaccaagcagcccggctagctcaattggcagagcgtgtgacttttatatgttcatcggattccgacggatgttcatcgaatgttccattcgtgttccatatcttgaaatcacaaggttcggggttcgaccccccggtcgggcagtggattccaaccgaagaggttggagtagcctgtccctttcttttttggttgcatttctttcttttttctctattttttattatattagttaactagttagttagttattgtgaatgtaaaactattcattcgttttgttcacgttcatgggtagatgattactattctttttcctcatcaggctttagattgagcaaatagaactatctaaatgtagatgccatattcaaggcctgatatctatggtcactattgctaagattctcagatgaaggacatttacagccctagaggttctacagctttggcaggatctcacctgggccacctgcccaggtgggcaggaacgacattagtcagcagtagttgacgacacctgcgcagcacccgatatagatggactcgagcatttttattaagagccgtttcactttaagcaattattggcatgcgtggaagagaaaacatatcacagccctcgtccatgcgaccgcctcgctccccttttgatcgacacagctgtggtatccacctgagatgagtgacctccagaaatcatttgccaagtcaaaactggccaaatttccacctgaagcaccaatgcctgaatcaatgagccagtcagaggatgcatgggaggatggctcttcggcttcctcgatgtcgtcgaccgggacaatggtcccgtcacccacgcggcacctattcgcccgaacaggccgacggttcgtttacttctccaatttccattagctcaacttgggatcaattggctttgtgaagcagctggttttgtaagaacaatctaacatgcgaccacagacaaacatcccaaacctctttgacatggacagacttctttgaccaggagctctttcttccggaggaagtggataatctccatatagtacaccatgtttatttaacaccgccgactgactcaggcccgctttttgtcatgcaccatggggctggttcatctgggctttctttcgccacgtgcgcagaagagatccggaaggtcctcccaaaggcggggatcttgtcactggatgctcgaagtcatggccgcactgtcatgaccaccttgaacaacaagacagtcgatgaatccccttctacggcggatgctgcccaggctgaatgctcgggaaaggttgagctcgatctcagccttgagactctgagccgggatctagtccatgtgatctaccagacacaaaccaggatgggctgggagaagctccctgatattgtcctggttgggcacagtctaggcggtgcggtgattaccgatgtagcgaagaaaggggagctgggtccgagactgttggcatacgctgtactcgacgtagtggaaggtacgctcgcccttgcggtttatatgtatcagatactgatacctccacttgacagggtctgcaatggatgctctacagagcatggagaaatatctttcgactcgcccgacccgattcccctccctgctgtctgggattgaatggcagtatgtatccgtctggactatcctttcttcccataatggctaacaaataccaagtactcactcccgcacaatccggaacactacttccgctcgcgcctcggttccatccctcttgtatgaagaaagcgagcctagcgacccgtcccgtccttgggtgtggcgcaccaacctctctgcaacgaaacctttctgggagaactggtttgttggcttgagtaggaagttccttgatgcgcgaggtggcaagttgctactacttgctggcacggacagattagatagagaattgatgatcgggcagatgcaaggtatgagtttcgcagatctctcgactagccgtctatcatcacttggaatcatgctcacttcagtattacaggaaaataccaactccaggtcttccctgaagcaggacacttcgttcacgaggaccagcctgcgaagactgcgcagatactggcggacttttaccgacgaaatgaccggagcgcgttggtgcttccgcccaaggtggcggatatgcaggcatcagcggcgatgaagaaggggactggtgcttccggtgcctcaacaggtcacctgagatagtattttatgatttgtctcggtgtttgaaatgagttacgatatccaatgaaagacgactcatagatgtaaacacgtgcttatccaacaactatgtcatctacaaggctcttctcggatgcgactacgtccttaaatgacggaatttatccgcatgcagggaaataaaatgatatgagcagaaaaaatttcattctcgcacggggtgagaagatccttcctcagggccaggtcaatccggccacacagggcggccagctgtccagccttcagtctgaagctccataccaccccactgcgacaaatattagagcaaagaaaataagtaaaaacaaaaagaaagaaaaaaagaaaatgccgggcacggcaaaaggttcgtgcctctccatcgataaacaccgagaaccaggttttcgagattccgaacgccaccgggattccatcacacggaatcatcatgcgcggatcgtgaaaagggatgcgataatacagggaggaagtaagggtattccgagagagaaaaagaaaagagtgcatgacgccaagaacaacggacttaggtgccattcaaggcaaataggcaccaccagcaacaaccaagttcatattggtgaacttgaccttgtagacaggagatttcttagttgggaaagcgctgatctggtcggccgtgacaacaacatcctttcccttctttttcttggtctggctcgtggatgggttggcggctgcatccagtctggttccagtgcctgtttcaccgatgatacggccaccctgtgtggtttcctgggaaccggcaacatcccaaactcgcacggtaccatcagctccaccggagactagcaccgtggactccacgctccagctgacagaccagattccacccttgccgtgaccgcgcatgcgcttcagcagtctaccaggtgccagatcccacaggatgatgcaaccctggtcgtcagcggatgcgagaagctttccatcgcggctgcactccatcgcggtgatgctgccagtgtggccagtgaacattcggacagcattaccagtcgaaacagcccacatgcgaacagtgtgatcagagctggcggtgaaaacgtatgctgagttgggatggaagcagacgacatcaacgtcatgatcatggccaacgaagatacgctgctggcggatttggtcactcacccacaagcgggcggtccggtcagatccaccggagacaaagtagtgactaaaaggtccccagcttagatcccagacagggcggtcgtgacccttgtaaacgaccatacattgccagctatcaagagaccaaaggcgaattgtcttgtccatggatgatgaaagcagccatcgggcattggtggcaaccttgtcatcccccgaaaggccctcgcgagcggatgcgcagggctggaatgcaacagcagttacgggacccgcatgaccgatgaggcggcgcgaactagcaggtggcgagttatcgaggtcggggtcagcagactgaaggttcgtgccgtcaaggctccaaatccgaatatatgactgctggaatcccacggcaacaacctgactgtcgtctgcaaagtccatgcaagtaaccctgtgtatttgttagtaaagctctctattgccgaaagggccagatgaacatacccatcataagtgttgtggaatgtgaacatgcacacactaagcccaggaccaacaccacccgtgcgagtcttaatctcgaaccgatcgcgatgttccatgaccttcttcacctctatctggacgtcacgagcagtggactgagggaaaggaagatctgcacgattaggtgcttcgtcgtcatcttcatttttaatcatttggtcgaactcttgaataagagtgttacggccggcggctggaggctgtttcgcatcttcctcagcaagctcagcccgcacgtcctcctccagaagttgttccatggggagtcttccgagtttcaggcggggaagcgtgccggccatggctgggttgtcaccggtgtaagcagagccagggtggtgtccaggaatcccttcatcctcagctgggaaggtctggtccgcactcatctggttcaacatggcagcgaaactgaatcgatcatctgctgctcggtctaaagttttcaccgagcagaaactgctgagaatcgcattcatgacagaacctccctctttatccttgctctccaggaactggagaagattggtgtaggcggggttgcttaacacaacgcggtatttgttgtttcgataaagcttagcgacagagttatcttgtaggtgttccggtaagctgattggttcgaagtggcggatgtcatcggtatgttcaggaaggaacatgttcttgttggtttcaaagaatgacttcgcatcctgaggatagaaagaagtcaccatattgaaaaaggaatagacaaacagcggccacagaacacgtcgaagttcaggctgtgagacaattagcattgagttatcaagtcacaccttgcttgtcgcaccttgtacagatcaagattttcctcaacccaattcttcagcaagtctaataatgcattagttggtatttcgaatcaccggggttcgattgccagctcaccaaagccttgtcgagtcttggggcgagaatcttcccccaactgagggagcgggcgcccatcaatctcctggttggcagactccatgcgcaacattgcctctgtacggctgtagcccttcttggccaaatagtcaataacctaaaaaagggcaaaggtcagcgtacattcaggcgagcattatttgagcaaaaaaaaaaaaaaaaaaaaaaaaaaaaaaaggaaaaggaaaaggaaaagaaaaagaaattgtggtaagataagcagggtgtggtggaagaaggcttggtgagcaaacagacagcctgttcacgtgcgcgtgtctcctcaacggacagagcctgcaaaggctttgcgatgggtggacgcggcacaatctgacgcggcacagattgcgccggagtttgtgtcggagtcacatcagctgccaccggcttctgcatcggcgtcttctgcgtcttcgtcttctgcgtcttctgcgtcggcgaggccgcgtgtcggcgtcggcgactgcctcgccgacgagggggcagccaatccttgtcttcagattccatatccacgacggttctggcgatgttttgcgactgcggcgcgtttatgtggagatgaaagaaagaaaagtgtggattgatgggttgacaaagatgaatcaaccgagtgaatgatacttgttgaagtgtgaagaagaaggattgctgggtgagaaccgtgtgaagagaatcgtgaatgaatagtgtatgtttgactttcgagttgtgatgcctcgggtactcattgaccgcaagtcatgagttgcgatgaccaataacagcgagctagcaatcctctttcgaggtctgcgaaatgaacaatattggtcggcgttgaaaagaaacccgtgcgttcctccgtaatggacttccgtcaccatccacaggcagtcaccaatgaataagaaactcgcagctttgttgcaccaacaaaaccaccgacattgtggtatgctgcccccatgaagctcgaccatcatccaagggctgcaatggctaatgaacagggtgccctggggttcgtgggatttccaatgtcgtcgatgctgaggcaaaacgccctagagttccccgccttggatctctgtcgtcgcgatctggggaatgcagtggaaacatcgccatatatcaagcttctcaaactcgggggatcccgaaacacacaggacacaatgcaggaggaacaatgatcgcaaaggggcaagggggtatgtgggaaacaagacatcttaaagaaggcacaaatcaaggacaagggtacctactatttggttcaaattctgctgcgacatggcaccgcttggtggtgcactgggccctggagtaggtgcagaatgaacgggggttccaggtaatggttgttgggaaggcatcgccatcccattaccgtttacgcctggtcccatactgccactgcgcggtccagggcttggggctccgcctggtgccgacataatcgacaactaacgacaacttcgagacagatcctccaattgcggtggaggatagcaactgagcagggttgcgtacaatcgccggcgatttatatgatggacttaggttgtcagctatcagtgtttgtctaatgtatatagcgtccaaaggtaatgggacttcgcgcgttgaacgagaggataatggatctgatatcttgaatttgatatcccccgggctgcctcaccgcttattaagacctccgcaacttcaagcacgtgattccagccaataagctagctctccaatgtccattgcgatcttgatctctcgttctacacgtgaagcctgaaaatctggcagaattgattcatacggacgcagctctctactcctctcttcatacactcccaacccaatcaatatgggcgaagacgcaaccccgcaagagctacctagctttacctctgccgatcgcattcgacagctgaatgagatggacaaggtactacgagcatatactttataagggaccatttgctgattcttcttcataaggatgttaccaaactccttcattctgccggtcttgcgatccaagccttgaccaacgccaagccggacccctctgccgttgcatcagatggatcactcgactcgcacaaaatgcggtttaaagaagcaagtgcgaaatacttcgcgcttctctcctcagccgacgtcaccctccgccgccaggtctactccctagaggaatcatctctcgtcggacccgagaagggctcacgcgcaggggacacaaaagtcggagctagaaacgaaggagtcgcgggagctaagtcgcgagcgccaaactcactggatataagtcggctcaatagcaggaaggatacagttgggaaagataaggaggctgaattgtgggcggctgctcgtgaattcgttgaacagatgcagaacccttccgagacaagcaaggattccaggcctgcgaatgaatcggaggacatgcaggtggattgagcaacgagctatcgattcattctgtgcgattggttgagtttccttcatgcgtttatgataccccggactatctgctgccactggcattgaaattacgaatacaatgcggtcccattggaagatggtacatacgtttacacagtgagtagtacatatgtaaccaacgctgggcgcaagcgtgtatgaatcagtgttcgatcatgttcacagaactccgctatacaaaacgaaaagcaatgacaggtatagttcatcggcctagccgagcaggatatttgtcggaacagtaaaatgactacttctgcatggacatgatcatttcccgctgggtttcccggtctctgttcgcatcagacaatgggcccaagcctaggctcttgttagcatattgcaacagcatggatattatatacctccacttacttcgaagctcgccaacgacatccttcgccttgccgaagtaaacctcctctgtggtgtgaaagcctaggtcagcataaactactcaagcctttaaacggcgacgagcgaatgtaacatacgcagcagattccgcatcttcaactccatatcctccaccagcctgcccacgttggcgacatggctagcatccgactccacaggcagatcaacttccacctggcgagtcatgttcccgctgaggtccatatcgccaagagcctcggttttgttggcaaggtggaggataacggtactagtgagtttgtagtgggacatgcgagcgcgatcggtggcctcgaaaacgtgaatgctgtcccattcgccggagctctgggagcctggggtgacacctaatcaaaggaaacagtcagccgcaatttagagtatagtaggcttcggtcagtccgtaacgcacccttcttcaatagaatcacaccggcaaaaccatcgtccaaatcccagaaatacacactccccacgcctccctcatagtacagttcgcggtaaacatcgaacgactcattggccgcaacctcgagcttgcgcactcgctcactgggcacggtaccatcttcgagcggaggatcaaactcgttgctccatggtgaccggtagctatcgccgtcgcggttgtagtcgcagagcaggtagtcgcggttgctctgcgggcagcgccgaatctccaggggctggtcaacggaggagaggaggtcttcggtgaggtctgggacgattgtggtaatggcttgcagattggtcttggtgtcccgtgggttcagacgccgaaggaggtcgctgcagaaggggtggtcagctcacttgtctccgactgcatggggcggggttgcgtcgggatcggggattgtcatggtgagtgccatggttgggggacaaaggggtctgtagggtcatattggttgcgagacaagttactcacagtgcgctgtcaaattgtgcgtcagccatggttgcgaaggtcggttgtatatctgttgcttgatgaatggcggtgttgatcttgggcggatgaggtgcgtgtatgtttcgggctgcttgcgtggcagtacatgatatctatatcaatcgaacatttcaacttcgatagcatccataaatagatcggaaaagactacatgaatatatagctattgttgttccttcctatttaactctgttttatttgatgatatattggttttgaatttagcatatgaaatacgctcactggctgcatggtcttaatagagaagacaggccattgtcggattattggatcctcagatctcacaagaaatggagagaatcattctcctcggcttatgtacggacttgtctgaagtgtgtgactataataagcccggcattcgagcaaggcctattagtctaagatgtctcagatatctttgatctgagtatttaggatgcacatatcacaaccgtctcgggggagtgtaaaaagaactaaacccggagttgacatgtgcatagaggcctctcttaagtagaaccagaaacaagactcatctcctcctcccaccacccagcaaagatattcaacctctccgtccgtatcctagccatctctctccccgtggtagtcttcatcatcccctccagcttgaccaacttgtccccaaaatgctcaatggaattatccatctcccatttcccatcaacgcaatacttcttccctacagctccaaggaaggtaaaacacctgccgattccaacagccccgatggcatcaagtcgatcagcatcttggacgactccaagctcgacaaacccatcctcatcaatcatcctccggatcaacgccggatccttgcattcagtcgtataagaaacatgcgatacgatggtctgaacccgggatgcgaggtctggcgacgcaccccgcgcaaggagcgcatgctgcaccatcgtcgttgggtcgagttcttggcttccaggagctgcatcgatcttggataggtattttctgtcaccgatgtcgtgtaacaaagctgcgagtttcacaactgccccgttgtattgcgttgtcgggtgcagtgcccgctccgcttccaggatcttgttggcgagcgctccgactctgtggacgtgtgctgggttatgcgatgggtcatggcctgacatgcactctgtcacgaaagcggacatgtccttgaagagcgcttggaattcttcgctggtatcatccattgtggggcttttgatccggttgttagggggttttctttttgttgcttcgatgatacggactgaaaccaaagacctatgccaacgatgcaagtttgatttgtataccgaggcgactactggatttttcgttcctgggaaacagtatatttgaagaaattaccgaattgcagtaaacaacccattttggcggtgaatggcactcgactctttttcgcgtcaacttatagctgcagacatagccccgacacgcgtgtcacagtttcgtggaaactgcttcaatttattgacgatatagagaagctcgtacattgtacatgtagggtgctaactttgcggggcctgatctgcaaaggaaggcaatgtggttaggaacaatataagttgagaaattactacaagcttcatggaacgtgaatagatccgagtccgctggctgcaaattgcgataattccattaaataaggctccgagagggtagtcaagatactatcacacggaagaaagtaaaattatgttacaaagccaacagggctaccccatagatccagatcggagatagtcctgtaagaccatgccgaattacaaggcagtagactgaagacccgatccaatcttctcacagagcaaaagcagcaacaaccaggccgaagaggccagcagcggaggcaccgagcttgacattggcagcggcattggtggtctcctgcgaggagcccgaggagctggtagcagtgcccgaggaagaggagtcatcgttgtcgttgttgtcattgctgtcattatcacccgaagctaaaggctgacgttagtggagtctccatcgacaaagtgaacgtggacatacacttggaaccggtgctcgacgagtcagagctggtctgggtggcagtattgccggtaccagtggaggtggtggaagagtgggttgcggttgcaccgctgccgttgccgccccagaagtgcgagctgtagcaggaccgctcacactcggcgtacttttgagtgtcggcaacggagccagtgccctgaggacaggcagcaacacactcgttggtgtcatttgcctgctcatcgctgggacagggcacgtggtagcagctggccgtgcagcagatatccctggcttcgcctagagttgggctgaattaatatcaagctaaagatgtgactgcccgaaagagtagcttacagctctttgcgcactcgacctcgggagtactggtaatgattgaagggttcgcggtggtagtgtctgcggcagcgacagccagcaaggccgagagagcaaggacgctgaacttcatgttgaataatatagtagcaaggaatgatcaaatcagcgaagggagaaagtgctaagtagtgacagtatttggtagaaaagagtgatagagttggggtgggaaaagggcagacagtcaagtatttaatattatttgattattgggataacaagtacaaaagcaaacagacgaccttggcacacaccctgccatttcattcgtgatgtctcagattttaattcgaggatgtcaaagttactgaatttgacgctttagttatgaccaagttcatccaactgatgcacggcaattaccttactcccctggaccagtatattgtgcaggacaatctcccccttgggaagggatcttctactccgtagtttttggagcaaagtgagaccctggggaacagtacacccaaattggacaatattgattgactgcattagcgtgtgagtaagggaccgacctattctctgctcgggtatattgccgttcctattggccctcaaaccagggagaaccttgaaagtcacaaagagacacagaagacaagcttaaaggatggatgtactttgtactccatactccatactctgtagtacgaagtgcaattcatgtggctactgtttgtcaggtggaatatcaaaacagaaatgtcctctaaggggtaggatcaggcagttggtcaatatgataaacatgtactccgtaggcactgtaggcactgtataccccgcaaatcgtctaggctcggctattgagactcaagataatgcaaaccatacaaacatcatatcacctgactacgcgacgcgtcgcgagatggcacatacggagtacaacggcaatgcctttcaattattcgcgcgatgtcgacagattccgagtcggattacttcgatgatgacgattttgtagtccctgggacccccgatggaccctcccgtcccacaaaacgccgccgtattcgaagtcgcggggaagagcgtgaaggtcaagatgacggttcttcgatagagtcgttctctgatatggaggatgacggattaccctcccggggccgagaatcgcctcgcgatctcgaagaataccagaatcgctccaaaaataagagctgtgtactgaagcaagccagcgtccaaaatgacatgttcgtcacacagctcacgcaaccttcctcaagccccgaacgaatacggggtgcacgatggcagaagcctgctgcgaaaccgcctccgccaaaatttgaagctggaggaccagatggtgctggtggacaggagaggaatcattcccatgatgatgaggaggagttgatggccgctatcgcggcttccttagattcatttgaagaggagaaaacaaccagagcggtattacaacccccgagtttatcaaacaatactgctccgaaaaggcttgcctcgccggaaaagacaaacacgcacgtctccgcggatgtcccgtttgagctggaggacatacctgaaggcgcattcgactcctcgccatcattgtcaccagtagcacggccagtccagcctgcaggtccacaatttagtcaaccccgaggctcatttcgacagccccatctcagacagagcacgttattcggcatggttgctccaaaccccgaggtcttggtcccgcgccaaccagactggggcccgccagaaaagactgagctaccaacccaacacaaacttgtcaaagacgctttggatacatgggtctaccccacgaatttgggcaaaaccagagattaccagttcaatatcacccaagcaggcctgtttcacaatctactggtggccttgccaacgggcctgggaaagacattcatagcggctacgattatgctgaactggtttcgctggacgaaagattcgcaaatcgtttttgtagcaccgacgaaaccgttggtttcacagcaggtatcggcctgtttggacattgccggaatcccacgctcggagtcgaccatgctcacgggaggagcatcaccgggtattcgcgccgaagagtggaaatcaaagcgggtatttttcatgacaccccaaacactgatcaatgacttgaagaccggaatcgctgatcctaagcgaatcgtgctgttggtcgttgatgaggcccatcgcgcgacgggtgcgtatgcgtatgtggaggtggtcaaattccttcgacgcttcaacaacagtttccgcgtgctcgctctcacagcaacgccgggctcaacagtcgaatcggtacaggcggttattgatggtttggacatagcacgtgtcgagatccgtacggagaactcgatcgacattcgcgactacgttcacgctcgcaatatcgaaattgaaacattcgagaattcagatgagatgattttctgtatggacctcatgtctgcagccttgcagcccttgcttgaccaactccgaaccatcaacgcctactggggacgtgaccctatgggtctgactgcgtacggtctcacagtggcgaggcaacaatggatgcagtccgatgcaggccggaatgccagtttcggcttgaaaggcaaagtcaactccattttcaccgttcttgctagcttggcccatgctattgacctcctcaagtatcatggtattgtgccattctatcgccatatcattcatttcaaatcgagttccgagggacagaaaggcggaggtggcaaataccagaagcaagttgtacaagatgatagtttcaaaaagctactcagccatcttgagccatggagtaagaatccagagttcatcggtcatccgaaattggaatatctcaagtcagtgattctaaatcactttatggataggggagaagggaaagagttgccgaacggcactagccaacctgcgacccgtgtcatgatctttgtgcatttccgtgatagtgctgaagaggtcacgagagtgctcaaaaggtacgagcccatgattcggcctcatgtttttgtgggccaatcaagcgcgaaaggctctgaagggatggaccagaagacacagctcaaaatcattgaggatttcaagaaaggcacttacaacacgatcgttgctacctccatcggcgaggaaggattggacattggagaggtcgatctgatcgtatgctatgactcgtcggcatcgccaatccgcatgctgcagcgcatgggacgaactggccgtaagcgggccggtaacatcactctgctattgatgaaaggcaaagaagaagactcctatattaaggcgaaagataactatgaaaaaatgcagcaaatgattgccagtggctcccgattcacgtttcatgacgatcgttccgcacgcatcttgccctcgggcgttcgcccagtacccgataaacgacatgtcgacataccaccggaaaattcgcagcaagaactgcccgaaccgaaacgcaaagggcgggcaccgaagcgacctgcgaaggtgttccacatgcccgacgatgtggaaacagggtttacacgggcctcgactttgggtggcgataagccccagaagaagaagaaggccactgcatccaaaaaggcaaccacccccataaagagactccggacccccacacccgagcctgtggatgttccgtcgctggaggacgttgtccttagcgcgagtgagcaaaatgatcttgaacatcattatcagaacatcggtaccacttctccgcagttcatccgattccctcgcaatgacgcctttccacgtttgcaactcattgaacgacccacaaagaacgtcaagcatgggtcactcacgcggcgcatgataaaaaccttacagaagatgcacgaggccggccctgactgcgagcatcgattcaaagatattttggctcgcgaaccactattgtcagacgagtccagtcaaacgtcccagaaggattcaaccgagaagcctcggcacaactcgaagcccttaaaaacaccatctaagagtactgctcgacgagctcccaccaagaccactgcaaatcgtgctggcggggaggttgtttctttattgtctccggatcgtgaacccacgaacaaagacccctttgccttcttggatgatgactttggtgatgatggctcggatttcgaattgatggacgctagccttttgtttagtagtgggtctaaacctaagggtcagaaacccaacaggccaattattgaggatagtgatgagtgatgaactagagacaggcgttttttaagctgtttggatatgtctaaggatcgctacacaatgaagattcggatggagaaataatatgtacgccacaatttctatggaggattggatggacatggaagagaaagagagaaagagaccccgagagagctgttggcgggtgctgtctccgtgggcgccgatcccccaggccgctagtgtcaatgccaatttcgtccctggaatatttcagatccgccgtcattcgtagcttacctggcatttgatcctggaagctgacccagtcttagtgtacctgctatggggcctagggtcttttggcatgttgtttgatacaagtaggacatattcaggcctgaattcatgctggctgcctttggccgtcttcgtatttgcacgatttgccgtgggtgcatgaatgactcaaggacgtgtccattcatacaaacacctcctcggccttccgaaacctcgtccagtcgtaacatatcgtcatcttccccttcggaaagatctttagtgaatgatcattttggtccgcacattgtacaaaacatagctatcaccctcgtcgtaagcaatgagacgagcttcttccatgtgtggatctacgtccgcatgctccaagtcccacttgatctgtttttgagcgtggagtcccctcatttcttggagctgcaacttgctgaatttgcgagagaaaatagaaggattagcccagttgaagtctcctccttgaacgcttgccagctgcataatgttgatactaccgtcttcggcgataaggcttgtttccgcgaagaaagcgagccgcaccggaatggacggtcagtttgcgaagatgatcccgaagcgtactgagatcgactggcgtcctcagcgccccgccggtgaccgcaaggcccgcgccggcaatgcccttagattctgcttgcttaacgtcgaatgggaagctggaacgtgtgtaacttgcgttaagcaccagccacttgcctcattctctctgcattgattccgcataagatgagggcttgtaggattgatgtatcgatggcttggtgttgattccccctcgtgtatttcctagtcctcgtaagttgtttgccctcgagactagtgttgaagtacttggcagcactctgctccttcgttcggggaccaagagaggcttgtaagagtgtaaatcctcgagggccaagaaagcgtgacaatgattggaagccgagacaaaacgtcttctcgaggatgttgtagagacccaaaggattcagacgatgcatccttgaaccaggctgcaagcttctcaaccaggtcatctctgagtcttgaggtaagagaaggtcacttcgtggggttgaagcgatttctttttcctttcaaattgttactgacgcgtcttgctaacgggtgtcaacctaacatctgtggttgtgttcatatattccacttccgagtatcgaagtccatgttcatgcctttttcgagctccgagagaaccaggccaagattactggcacatgttatcctgctcccatttgagagaatcagacgtcagagtattgttcgccttgaatcgaacgtcatagactttcttcagtctggactgggttaacgaaggggcggggtgagtgtgatggttccgacatagcgtgaaaggtgagaagggtgtcaaaatgcgtgccgatggaagcaggacgcagcctatgtggtaggcacgacgtctatgagacagacgggcgtgtgggacggctcatgtaggtgaccaaagagttgtgtattgacatcgtatcgcgtgtgttggcatatttggaattagttcgggaagcgcctcatagctcaaaccctggaggtcatgcccagggtagtagaaggatgtgtatctcccaatgactggacaaaccagctacagcgaggtgatcaacaacgagtagaggatggacctgttttgccgggtgtaataaagaagccaaagcgagaaagtcaaggccaagaacctctacttctatgcaatgtgtacggtccaccaaccaacttcttccaaaggccttctgacactgtgtagaactagcactgcatcattcaggggacagccggtcaagagccgcgcctatctatagtagaagttggctggtcactgatctgtatacatggaataaagcgtatgcttttggcgctttgcagctatctgtttcttgtgattgtattccattctagcttagggattgttgaaagggtgcatatcactcccgctgcctaagaaaaaaataagagacaaacctggctgtaaatcatggccgagcctcccatctatccgaacataaaaaatccaaggacgttcagggctcgatctgggtatttgggtatttgtgtgtttgtgaacgatatcaaacggcaacgtcaatccgagagcaaagaaatcaggaagccgaaaaacaacccacctcgagagaaagacagagtatgggtttatgcaagtgtttagtagtgctgaaaggaaaagcaaggtagaatcgaaagggagaaagcaggaaagagaaagcaccagactccaagtgcgatcagcgacgccgcgcgagcacaacttctaaatcaatgcgaagagtgtagagtgaaaagaaataagacagaaaaagagggaatgtcaagtcaatcagacgcggtcccgagcaaagtcaagcacttcgcaatcatcctcaaagaaaccgtcgtcagctttcagcggagcggagtgtctcttcttgcggcgcgtggtgataacaacttcctccacattgccggtgctgtttccaagagtgataaggttttctatatctccaccagcgccaagcgaatgtccatggatgacggcgttctcatcctcgtcatcgccgtggtcatcgctggagctattgaatgacctcaaatgtactttggtcagcgggatatcgttgccaaagacccattgtccactcggctcactcgcatcgctgccagaggagaagacactcagaccaactcgctggtccgtgtggaacggctggtatggggtatttgtctcgatctcagcctgcgagagaggctggcaaaacgatcttgcagcaccagatggctgagagctgatcgacggaagaacaagagagacatgaactgctagttctgggtcaaaagcagacaaaggagccggtccacaaggtccctggagattatcaggtagtttgacctggcactccttaccgccgacaacagagtgaggctgtcggttcttgtggccgggtacaatagcacgcttgaggcggtacatcttgaagtacccgccatccacaacacccaagaatatgaggcccttgctgcaaatccatgtcacccgagaaggtgcagggtctcgagccaaacctggcaagtgtagacggttgtccccaacatggcgtagagtattgacagtatccgttgcagcgcccattgacttgctcaggcctgcagcgacaaccttcccgctctttacactggcagcagaaggcaacacaaacccactcatattgggaaacgcagcgcccgtggacgggacacgaccacggacagcggaaaagaatggctgcgttttaccgccaaccaacttcatggccgctgataacgggttgccaccggcagcttgaccggttacttcatctgccgtggggtcggtagccggcgacttatttgcagtaggctttgcgcggcggaacgggggccattggaatgcgcttcgagggagatcgaaaacgtggacggtgcctttacgtgtaattacagccaatctatcacccaccggcgccgtccaaataacatcaacgatactagatgtagtcaaccgcgcgtacctagcaatctggcgcacattggggttctgtcccgtctggtcatcagccataaaagccatggaccgacaatgtttcagttgcatgagatcccacacatattgcacatcgcccttcttgctcgctgtgaacaacatcaagccatttggagaaagagacaagaagctgcaaccattaggaacctggaacgtcgaaactgggtggataaacacatttcgtatatctgtgccgtcttcgaatcgtctcaggtcgatgatggatacggtgtcaggttccgtggctgatgtttgtgtatcctgagcatgtgttggagggaataatccatatccctgcgtctgggggtccggcccgtgaggaggccgacgaggtgaggtgccggctgcttgctgggcgttccaataattattccaggcctgcatcccctgatcacccatccagcgggcacctctgacgagttcttgggcaacgcctcttgccatcttgtcgaagaaactttccccctctcccacgtctgtcgcacacgacaccgaggggacagcaggaggactgcgagtttcaatgcccggaaccttgccgaggatcaagcctgaaggaactgtgcccaggatcgatcctttgtaggccgaagatgggggagcgaatgcgagccatctcccttggaccgctaagatgggtctttccagggcagaagagccatgaggagagtccgtgcgagtcccctctggatcagttgtagaactcgaagatgtcgagtaacgccgggtttctttgtactgaaccccagtccatgtcttacccagacactggtatgcagtcgtttccggggataggacatgcctataaacataaacctccccactgaccccggatgctaggataatgtaggcaccagttgtgaagagctttaattttccgacaggcggaggagcaaaggacgcgaggccgggcaggctttccaggcatggcacaggcttgcttgcaaacaaggtggagacatgttcgccggtccggaaagagtaaacttccactcgggtttggtagaactggatgtcgtctcgcactgagcgcttgtcgctagagtgaccacgaatcgtggaaggaggaatttcatttgcgtctgatgttgcagacgagactcgaccttcctcttcgtacggtggcaatggcccatgaacaacgacagccacatgcggccgggatgatgcaaaagggtcgctagatggttggccagataagagtttggcctcgattacccggccatttagcccagtgatctgccccacgagccgggttcggcgatcttctatggcgaggatctccacagcgccatccgtcccaaccagcaaaacgttcattcctgtccgcgaacctttagatgacaagctaggtagcgtatcgaagctacagaatgaatagtttccatcgttggacgatcgattctgagttggaagaatatcgatgtctggtgctccgaagaaatgtgcttgaggaagatgagggggaggcgcctgattgctcattgggctcccgtaagagtgactcttcctcctgtctacagaatgttgccttgagttcagactgtttcggtagccattaccgtagctagatggtaaagttcgagtctgaggagatgccgaggaaggatggccgaagccacccctttcttgaattgttgggaagttcaagggcgatgcactaggcagtgatgcacttggtatgtccccatccatgaggtcggtgggagggctctttccataaggaaccgattgcgcccacgtatcggtgcggctagtgagatcatcacctgctggctcatcgagggaatcgagggcatccagaacaggggacgtgatagacgggtttacatgatgttcaataaggggttccgggtctgggcaggagagaggctcctctagcggtggggcagacggttggatgctatccatgtaatctggcgttaatggcgcgcattcatcaggaaccaggcaatcaccggtggatacatacatatcatccggtggggtttcagttgcagccttggccaccttgttcttctttcccttcttctttttgcctttcgaacttggttcatgctctggtatggtccggttgtgctccggggcgaggggggtatcgtcttcgggcaaacggctgtgctggcggatgagatcgtcagatgcggccgggagcattcaaatagatgatgcctcagtgagaggcgatagagaagcaacagaataaagccgctctcaggaccttatgtgtggcctgagaacggatatgcaggcgttctgttcgggatcctaactaggcacgggagccttggggagatatcactaaagaggacggctttcacggaattagtcaaatgctcaaacatcctaacaggttgaagacactatgcatacctgtattcacagtatccttaagaatacgggagtggcgattgtagacaccactaatagcggatctagagcggaggtcactccagacacgcggggaagctttgatagataagcacaacacagcaacagcttgagatagttcaaactgttacagaaaatagtaatccaaaatgacttgcatgcacaagttccaaggttgaagtccgaagatgagtcaaggaggaagaaggatgatgttatggttcgcgataagagaagagggggggaaagctgaccccaggtcaccagtcaggtacggctgctagggcggaataggatataatagggcctgagtcagagcacggaataatcctctgacggtgtcattcccaatgaaagcatgatgcatgatctgatcctcggtctttaccccttctatctttgtttttccattcaccaatcccgactctacaatgtaccttgtggccgtgaacaatgcagatgaggggaaacctgtcaaaccatgcaaacaccgataaggccctcttagtcataccttctggtccgtggacgggtctgcccaggcatctcgcgtcatcagttgttgctaaatattacctccttgcatgctttgacatgacactgcatggttgaaggcgacaggcaagtccacccgtatcttttctgaccagtcctagccactcctggtttgttttgtcaataaagttgacccgccgttgaaggggtggctggcgtcatcgttggaaccgaggtcacaggacatttgcggcatgggaaaaatgacgacttgtctgggctttgatggcaaatggcatttgggccggcaaattcaggctctttttcttgggctacagtggttatatggtccatatccgtggatattcacatacatatggccactttatcctccactatttcctgcaccttgtctaaggcacatccagcatgaaagtgtttcttaggcgcctcaataaaacagaattaaattaacttgggatgtgttttgatagccactgagcttcggaatggttgatggtacagagtgctgtcacagagggttgccctctctcctagtatgatgtccacggtcgcttaggtcttcttcttagccgcagctttaaccttggctgccttcttctggttgctgttgatcatgacaattccaatgaaggtgcctaccacggcagaacccaagagtgtgaggatgacggggatgcggatggcccaaacacggggcgggaagatgtcgtggagagggtggccggggtcaacgaagggctgtagaacaaacatcagcatagaaaaaaccaaacagtatcatcaattagcataccatcaacagggtccacgcagtgtagtagagaaagatcgcagtcgcgaccaaaagcatgacggatcccacgagttggcccagctaaaagcacagtcagtgggggatgtccattgaatgggaccagataatttaccattctgataaagagcggtaattttaaaaaagaaaagaaatatgaaggaacgtcgatgaatcctgggctggacagaactaccagggatctcaggagctcccgttgttcctagttggcctctctctagtcacgtgcacagcgctagagctttctcctgctgcgtccttgaatctttttgcttaacctcagtccggctgagattcgcaaccaccgttcctccggtgtacatcaaaccttttctctaccccggaggcctatttactcattgaaaatgtccgaatcggatgttctccagtctgcggtgcgcgtgcccacgcctcctccgggcgcgtcgtactcgccagccgcagcctctcgaaaacgctcacctccgtctcgttcaccgtctccgaatcgtcgccgatcgcctcctggtgattcccttcgagatggtccccatgttccgaacgtcgacgcagagcatgcagacgacagagaacggcaactcgctgaacgtgtccgcgaacatgaaaagcgcgaagcggcgcgcaagccgatgaccgaggaacaaaaacaggcttcagcaaaggcagaatacgaaaagctgctgaacatgcgatccggtggcacttacatccctccggcccgactccgtgccttacaggcgcaaatcacggataagacgagcaaggaataccagcgcatggcgtgggaagctttgaaaaaatcgatcaatggtcttatcaacaaagtcaacgtttccaacatcaagttcattgttcctgaactctttgcggagaacctagtgaggggccgaggattattctgtcggtcgatcatgaaggcgcaggcggccagtctacccttcactccgatttacgcagcgatggcagctatcgtcaacaccaagcttccgcaggttggcgatttattgcttacccggttgattatccaattccgcaaggccttcaagcgaaacgacaaggcggtctgcatttcctctacaacttttatcgcgcatctctgcaatcaacaagttgcccacgagatgttggcagctcagatcctgttgcttcttttgcacaagccaacggatgacagcgtggagattgctgtgggtctcactcgagaagttggtcagcatctggaggagatgaatgcacctatcgcactcgccgtattcgaccaattccgaaacattctacacgaggccgatattgataagcgtgtgcaatatatgatcgaggtgctcttccaggtgcgcaaggatcggtacaaggacaacccagcaatcaaggaggagttggacctagtggaggaggaagatcagatcacacaccgtgccggcttggatgatgagctggaaacccaagacactctcaacatcttcaagtacgatgcagaatgggaggagcatgaggaggcttacaggaaattgaaggccgagatcctgggcgaggagagcgacgaggaagacgaggaaaggtcagatgaaagcgaagaggaagaatccgacacggaagaagtacagatggatatcaaggatcagagtaatactgatctagtcaaccttcgacgaacaatctacctcacaatcatgtccagcattgatttcgaagaatgttgccacaagctgatgaagatcaacctgccggccgggttggagcatgagcttccatccatgattattgaatgttgctctcaggaacggacctactccaaattctatggcctgatcggagagcgattcgccaagatcaaccgactttggtcagacctgttcgaggctgcctttgccaagtactacgataccatccatcgttacgaaacaaacaaactgcgcaacattgcccagttcttcggtcacctcatcagcaacgacgcgattggttggcatgtcttgtccgtggttcatctcaacgaagaggagaccacatccagcagccgtatcttcatcaagatcctgttccaaaaccttgcggagaatctcggtctgcctggtctgcaggcccgcttcagggatgatatactgcgacccagcttcgagggtctcttcccgacggagaacccacgccacactaggttctctgttaactacttcaccagtatcggtatgggtgtattgacagaggacatgcgtgagaatctcaaaagccttccgcgtcctacggtgcccgctttgcctgcacgagccgcctctcggactccctcgcgcacttcatctgatcgatcccggtcgatgtgctcaacgtgcactggatctcctcactcccgccgttccaggtcaccttcgtactcccgctctcctaggggccgcggtcgttcctactctcgctccatcactccttcttccaggggccgcagctacacaccttcacggtctcggtccccagtccgtcgccgtcgtgacgtatcagacagtcgatcccggacccccgcaggacgctcccgctcccgatccatttcccgatccatctcccggtccatctcccgatccatctcccgtacaccggccaagcgcagtcgagcacgttcccgctcctacgactcgcgaagcccgagtcgcagtccctatcgaactcgtcgctcggttactcggtctgtcacaccgccgcgtcgaggccaaagccctcctagccggagaaaccgcagctactctagatcagtttcccggtctgtcacacctccacctcgtcgtgggccagcgtctagaggtagaagatattcaactgaatctgtttcaccccctcgccgacgacgtgatgctacggactctgtctctcgctcccgctcgcctcctcctaggcgtcgcgcagaatcacggggtcgaagctattcgcggacgccgcctcggcgtagatagatcgggagcctctgatgctttgattccgacttggggatcggcttcacagtccgtatgttactgttgataatgaaatagtgcgtatttggagcgaaaatacgacactgtgcttcttttattcggtctggtgccaggaattggaaaattatggaggttcactaggagcaaatcgattattcatggtgtacccacgcttttcggattccgtatttccgatgttcaaataaacatatccaaatagaccaccgtgtatacctcatgtaataagtctttgattttaggagccattggcaatattctcatttaatgcagtcaaaagggtatctcaacatgatctacaaggcgatctatacaccaacccataaacaccaacctactcaacctccccagcctcccaaacacacctatcacacaaacaagtcccacccaaagccccagaagcccactccctcctcttctgaaccggcaacccaatgtcacaatagtggttcaggatctctgaatccttcgcaatacccccaggcctgagttccttcatttcctgcccccgcgaccaaacagccgtctcatcatctctccgcgcgcggaaattaatctcactactccattcccaggtcacattaggatcacacgaatggttcgcaagacaccacatcggatgaacagcgcacagctccgggcctccatcccaagtcgacagccggccagacgccgtaccgcggaatttagcaaacagcgtgtttagaacccaggtatcatagcggtagagcacggtgtaaggatccagacccatttcatcgaggaaacgctccggctgcaggacattgagctggaaggagaaagggagagtggcggtatcgtctgtagtggacgctgtctctgtttccgcggagacagcctcgatatcgaaatcgtggaaatcgccccagatatatttcacttcaggcagctcgagcgggtgcttgtcctgtgtagctgacatggcgagcgctctgccaagcagaagaaggtacaggtaatcggccttatccttgggatcggggacatccttcccgatagaatcgaggccgtcctcgagaccgcagatcgcgccgtggtacacctcctgcgctttgtcgtgacatgcctggctgcagaagatgatatctacgcagccgccctcgcaggcgacgggcggctcggcggcggacagttctgggagtggtgcgttgcatgcgtcgcagagatcgtcgtggagacggttggttgctgtaagtagtgaagactcacggaggatgatctcgtctgcggcgatatcttctttcgcgaagaggccaagctgcacggagacgtccatgccggacgaggcgtcgtcggctgaggcatgcaggagtggtaaggccactgcacggacctcacatttcggcgcaatgactgccagtcgctcgttgagcatgttcaaggtctctggtgagcggcggtcgggctcgtgctcattccagggatagaggacacgacgggcgaagccctgtgcagggagaacactggggtcgattgagtccaggtcgatgttttcggtttcagagctagtgcaagatctgtatatttgcttcacacgatccatctgcgcgttcagagtagctactgacgccgttgcggatctcttttcgagcaaggccaacccgcgtaggccgaactcgaatgcatcgcggtaacagccgcagcggacgagactgcgtactagaaggacatacacctggtcgatgatggcgtcatattcctcttgcgtgatgggaacagtgttgtcgtcttcgtcctcatcgtctgattcattcgccgctttctggggagcctgctgcgaagggtctaccttccgcctagcatggaactcgcactcatctgggtcaattactgactctaaaagtgcaagcgcacggtatgcgtccgcagaggcgagatcagggaagcccaatttttcatactgaatgcctcgttcaaggtgaaggtgggggttgtgagggtctgcgtagagcctggcggttgtctcgttgcgagcttggagtatttgcgatgcagacatgatgtgatatgtttactcttcttttttttcccccgaagatgtaacaacttttatacacactttggcttttgacagccaaagacgcagtatagaatatcaagctgcggtaccaggttgggaaatgtggagtggtagagagagtaggctgtagagttcagcagctgaatctagagcatggacataatacccaatgacttttgacttttgtataagcagttcgtggtctgcccctctgtacatcgatattcgtgcgggcaagttctttttatcgccaaaaaaaattctacgataagagtggtcacgtggatatatagttctcttcagtgaaggttggctataggactattaaatcttgattaaagattgtagatcaatgtagacctagcatctggataaatcgttcatgcgcttctttctcgggtggttttgtaaatccgtctgcaacgttgttcttcgtgtcaacacgctggagatcaaccttgtcccggaaaattgcatctttaacgaaaaaccatctcatgtccagccaacaagtactgttcttatatgatctctttgccattaacaattgtgtattaatgttgtctgtcatgatcgcgatagcttctcccgcgccggggaggttaagagcagtggcgatcttcgagagccactatatatcccgtgcgggtcggtctgacgcacaccatttggcggcggtcgacgacagtgctataatggtttatttccgtgcgtagcaacgtatcggggctcccccgaagaaccaaattgcaccttcagtcgatttggcatcattccaatctccgtgagatgcatcggcataggcaaagaatgtagtgtctgcgacttttcctagtgtgatgcagagctctgtggtagccttcaggtatctgtatacctgacgtacctgcatgtcattgactgtcggagatgcagtgcggcgttgcagttttataactgcgaatttgatatctggtctagtttcaacagccagccagttcaatctgccgatcagagatctgtaccaagtgtggtcatcttcgtaggaggatctcggagttctcgttctctgtatcccacttgctacccggtggcaaagggattggtagtggtgaacaggcatggctgacagcagcggatccaaaaatgtaatcaattgtacggaccgtacctctacggcaatccatacgaagaacgaaaagtatgtcttcattgcgacttgttagatcagaagcaactaaccggaaagaagcaactaaccagaaacagaatgggtgcgagactgcccctttctcggtctggcctctagtcagcggtatgggaagtgctatgctacgcattagactgggaccccgttagccgagtagcctttcgagttaggtaaagaattctcgaggggaacaaccatgttgtaagagaattatacccatatcaaaggacgtaaagctctctacgccgccaacaatcttgtttacatcctcgttgacgatagatcaaacaagatgattgtaaagtctgattaccattcattgtcgtcgcgagaaacaccgtggccttgacgggggaaagccacgtccatgactggcattcgcatagtggtggtgatgcttttccgattggaagcaatagtcgaggctgtgctgagagagcagaatactacatactatgtcggcctcacgctggaatatatttataaagtgacaagcgggcatgaggttataaaatggtcggaaacgttgagtgatagtagagtaatggtctagtgagataaacgtgtcagtcacacgtagtatttgtttagaatataggataggatctcacacatttttttcgccggatcaagctatagacctatatatcggtgcaagttcgtttcggtttgtgagaggtttccgacgcgtttcttgcctatcgctgattgtccaagatatcatcgaacgcgagagtttctcgtgggtgcgaatagagaagttcctgccatgaggtacgtagcaaaagtagaagatctggctccagtggaccgaccgatgtgtgcaacgttgtttaaatatagaaaaagccggggtttcgtagttgttggggtgagggtgatggtagagagtaatcttggaggccctggtaggctttatagaagagcaggtgcctaaatatataggaagggcaggtgcttgaatgaatcagtccaacaaacgagtgcctatttgcattaaagaatgtaatgcgatgctataacaataaatttatggggttatggaagaccgatgatctttttcacactgtgcaatgcagatatccggagctctgcctgttcatccattacatcacctatcgaatgattagccttgtttccaaatccagtaagaaaatccaagcatactgagcaattatcatcgatgacaatagtcgggtgatcaccggtgatagcaatatcaccaattccacgttggcctctaaagttgccagccaagcgctcgagcatactccgcttcatgtacaagtcagcaaaagagatctagttagatatagttcggggcaggtaatgtacagtgatgtgtgcctcgttcataccaccacgacgctcaacatcattttggctcatgatacggtagctttcatgaactcgcttccgactctcgaggccgccgatagtggagccggttcgtccaaactggttggatggattgtcggggtcgaggatatttacaccgttatgggcatcatcttgagcgttttgatctggcgaaaatattttgatggtgttatcgattcctgaagcggcgatcattggttcgtaggggtggcctaaattaccatgttaacttttgtattcctaaccagtgagaaaaattaccttggacaacattgacaacctcactgtcaccttctaggatgttgaccagtttcgacgtcttgcgatcccagataaatatatgaccagagtcacagccgctgaccacgtactcatcattcagtccgaaatagttgacatccttgacggtcctgacattgcagtggccgcgatagcttcgcatatgaggtacacgtggagcatggcgctcgaccatttcacgccgcgccctgcgaatagcatatctctgggccatagtgtcattggaatcgaactcctcaccatcttcatccgaagaggaatccatgggccagccatcgagatcttcgtcatcggttgactcctgtgcctggctggcatcgctgccatcatcacctgcagtaatgtcgctattgtccgaagaagttgcatcgccttgggagcttccaggccgaggattattctgcccggaaacagaaccattagtcctgacgatttcgatgcgttggactcgttcttcctcctcgttgggatcgatatcagcctggtctctctcttcatccaagtcactctcagactcgtcgatcatggcgtgaagtcccccgaaagcattgttgacaaatctgtaatttacttcactgcctgtctgcatcaagatccctctgcctactcgcaaaatccagaatctcttcgccgaggcacggtcgagagagcgaatttgtgagacaggattagaaacacggcgcctgtcgaaccgagcggctgagtccccgagatcttccaagggcaatctaacagcgttcccaaatgcagtcacggcagcccgttgggtttggaacagaacgcgcgtactgtcatgctcgaatctggaggcatccacattcacgatcggagtgtcacgcgccaagtccataatatagggcaccaggattgtttcgatggcatcctcttcggattcatctgggattgggaatcggcaatgtaaccgtcgaggggcgttgcggcgttgaaatccccctagaaggcgttgcctgccgccctgcagccagagaagaattgctcggagaaattcatagccaaactgggctgctgggtcaatggggtcatcttcgcccggcgcaggcctaatcatctggaagtttgattcttccggaacttgcgtttgatctgccaatgcatgagcaagcgtgccagcagcttggacaaatctccacgaagattggcgattgcgacgaagtgattgctggaaatcaacagtctcctgcgatgggttcatgggatagctccattcgcgcatgacatcacccatttgcgggagaatcgtagacgcaatttccagagcggatgaaaaacatctcgcgtaggattcgggtcccacatcttcggaccctgcggcgtcccgaactgtagtttctgagaacagtgactttcgaagttttaccaacccttttgcgatctgcatgctcaatcgctgggcatcattcagtacagaataccgagcccgctcgagcaaatgctcggggttggtgtctaggacactacctgacaacgtggggaacggaacatcctctgcttcgccattctcgtattggatcctaaaagtatctggctctactgagcgacgacgggactgatgtcggccaccactttcctgcgatgaaggcgttgcgggcttcttgcgcttccggctccgtgaactgcggcgagcctgtctattcttgcccttgagagttgatttatctcccgcctgcgtctctcgagcatcggggctgcggattaaatcaaaactgtagatgtgatccccagaccaactaacaaccatctcattggggtttgcatcactgattttacaagcagtgatgtgtccatcgtcatatttcacagggtgcttgcctcccggtgcgaatcgtcgcacgcatcgtgtcgccttgctcatctcctcatcatcattgagactagcagcgcttgatgtagccctgctccttgcagcggaggtgtcctggctaagcatccgtctgtcatgcaaaaagcagtagaggtgtgcaccgcccaaggcaatataatgtggctgacttggcgagcaggaaatggtattgaggtccaatttgaatggcctgtaggagattaaagggggtggcacattgggctcgtcatgtgccaacctttgtcggtatgccctgaagccctggccatctcgtggcggagggtatgcactagatggtagtcggagatcccactggcggacatcaccatcctcggagcaagtgagaaagaggaacggtgacgattcggtgacgatgcgcttcacgctatcggcgtggcttcgatacaatctggcgttggtattaccgtcactcagataccgcgtgccagtaaagaactcattaaagcgccggctccgagtggaggctgcaaatgcggaggtggcagcatcatttccgctccttgctgagtattcgatatcgaagacgcgaacctgcgagtcgccggcacatgtaaccagagttccatcattcgaatgtggcataaacttgacggagaagatgttggctttgtggccggtgaagacggtggtattgagcgcaaatggagcattggacgagtcaggttggtaggagtagatattgaggtgcttatcatcagagcctgacgccaaaagacgccctgacttcgaccaactgcaggccgttagcatgacgaggatcagagatggcggaagtgttggccagtagataaaaccaagttctcgtcctaggtcgaagctgtagacatacctgagggcattgacacatccagtatgcccaccgagctcattcacaatgtcaagatcgttgatccattcgttggatccgtaaattccccgaagtccagcgtgctgcaactgttccccacattcccggcgccaaaggcgatcgtagagcgagtctttcatgatcactggattagatgggcgataaagttgaaattcttcgctgggtacgatcggcgatcatctcgaaaggtactgagtaagtggataccgtctctttgcgggtggcttttgtctgtcaaaacggaagctgccgtggatgacgtcaagaagagagctgagagataacttttgcaaggttacatcagcctgtataaagcagctcattccaatagatatacgtatggtgcagaaagagataagtgacaatggagtgagaaagatagaaataaaagtatggggaaaacgagcgatactccaagatctagaccatcgatatatgggagtcctcaggtcaagtcgggatgacatggctgactcatcggtttacttcggactaggtaccgcgcaagccatggttgcccgcaaggtactttgcgcgaagtactatcacatattcccatcaacattattcatattatcttcatttcctctttattcccacataacacgtgcgtgtgtacgggtgtttcgaaactagctatgggtattcgcacgttacgatgaccataagcatatataaagcgcagactagcttctccatgccccaactcggggtgccctcttttccctcgtagaacacgccagttgtgtcgcaagacggctgacagaatctctttctgaactcaccacttctctttccaatgcttgcatagcacggatctcctccgtcataagctgtatcaattcagctagattcctggccactctgactagagcagactgttctagatgctccacttgcccgaatcccaggatatcgaggacttgcaattcacgaccacagagctccagcctcacatttaaagtatgcaatgattctttccagcttcgcgccagggggtcaataaaggcaccggcatcaacgtgccctggttcacggctatggcgaataacctccgattggttaagccattcttcaaagatcttcacagcctgagagtactgtgcacctctgctaccagcaatcatgtccgagacatcttggaggacccgggatagaatttgaacctgctcggagaaatcatgcggaccgtgatgttcacgacaattggaaagccaaagccctaaggcctgcacattcagctggcactgccgctgcgtttcatctgccagtactaaacgatactggctagcgacactatcgtactttttgcgcagacgtgactcggaatcatatttccattcagcatgggcttgcagtgagttagaatggaaaagactaagctgaagaagttcagtttgtagtgcagcaatatccggccacgatgaaggaatcagcatattcccaggctgaggttcggctccaggagtaggcgttggaggtttggagaatttcttaggggacgatggccgttggtaggttgacagtgttcgcgcacgttggccgattgctggggttgtttcggcctgttttgtattctgcaccagctgactcctgtggcgcgcatgcagtttggctgctgcgggcggttccttgctggcgctggcaggctgcctcaaagagtaggaccgtgtggggcgtggtgggggtaacatgtctgttttcttgggtgaagggggccttctggtcgtgggaggttggactggggatcgcgttcctggcgctttgcggggtgagggcggtgcaaatgatggcgctgagctctttggcgaagggactttaatattcgctgaaggcatcttcaatgcaccggggcgcatgatgctttgacgacggctgggtgccacagtggtcttcattgctgtagaatccgcctgtattggttttctcgccggcgataactctcgctgtctagttggcgacgggtccccgcgtggtttcggcttgctgctaggtggttgaatgcgcccatgacccgttccatgaccattgtcttgggcaaggttactgcgctgggggagtagggttcttcctcgggcagtgagcccattgtctttcagagcgacaccctcgaccggcgagggatttgatggtgaacgattcttgttattcgtctctcggacagtgtctttggtcgggctggccgtggcgggtagtggagtggagggtttcgtggtaggtcgtactatatttgaagtctttagtaattagcatgggttctgtatgtagttgttggcatggcaatggtggcacaacgaagcatgcgacagatgtggggagcttgccagggggtaaacaaacggactaacttgtttacggggatcgcgcagcgaagccgagcgtgttgggatgggcatgatcgtacaaggtcatgacatgagaatcggcatggtgcactggggttcaacggaagaaatgggtgctttgttgtgtgaatgggagagttgggtgggagatcttctccatggtaacccgctctgttattttatgcctctctttttcgatacctaggtatccccccatactccattagtaaaatggagtgaaattaattaaatcagttaaaaagaaataacaatcagaatagttaaaaagcaaaacatgaaaaagaaaaataaagaaggtcctgcccgggttcgaaccggggtttctggtacttcaatcgtctcaaaaaccagagtgatgaccactacactacagaaccagtgcatatcagttccagtggccgaattaaatacataaccgagagctaaggagatcatatttgtttaactagaacgaagaatatccatgaaaatactgcttggatttgttgaaaataaaatatgaataaatcccatatcctcccgtcgagcatgcctgttgaaggcagtactctgtcgaccatcagtcgaccgtcactttctcgtcactttcccgttacttgaccccctcctccctctcttccccctcattgaatcctattcaccatttcccatgtgatcccctcggaatgggcacattatacatgccagatcgtcaggtaggaatgaccgtcgagcttgtatgcagcaatgacccgagactcgtccaggataccgacctggtagatttccgatgggacgtccaggaggcagacaaggtgcattgccacccgatccagcaggtacaagacgccggatttctttcccaccagcacggacttccctgaggtggccatagcaacaacctcgttagagtcgtggcggctgagtagcctcattcctccccaggtcacgtcccattcccagacggaaccacccttccctcctgcaattaaataatttcccaccaggtggaggtggttcaccaatccgctggcagtgtgcttgaagttgcacagactattattattgttagtttccgatcttgaaatatcgagacttcccgaattcaacatacccggccccaaattcttcactgttcgtcagccaaatgcagatctctgattctgggtagtcgatatcatccgtgccagcagtgacaattgcttgctggttcatgcatacgaaccgaactgccttcgcatggcctccgagcacatggttgcattcaccggtttcgaggtcccagacgcgagcctcccgatcagaaccaccagagacaaggtacttgccgtgcaacttgaggcacatcacagtgcctgtgtgccctttaagggtcagcaaggcatcggtgctggtgggcttggtgagatcccagacacaaatgctgccatcaacgctaccggcaacaatgaagttcttctctgtcgcaatacaagatacggtgtcgtgaataccgcggagcgagtagaggatatagctaatagaagtcagtactaattggcataacagaagtaaatgttgaacactcacccacttcgggcatcccaaatcgccacatagccagaatggtgtccagtgacgaaagcttcacgatcctcccatgaggccatggcgtagaaagcgacgtcgttccaagcaagaaagctcattctcaggaccctgtgtgaaccactcggctcatggtatgcagtcaaccctgtggtctcttttcccagcaaatcagtcgagtcacggcggtaaagcaggtacaacccgcagcccacccatcccatgatggtaacaccctttttgatcattttcgtttcatgagcgactgtccggagctgacctggagcagccagaaaccattggggtaggtacgccgcagaggaccattcccagccagtttcatgcagtttgatggccgccagcctggtacatagttctgtggcaagcgcaaaggaccagccgttactaatataacgcagttggtgttagtatagatcaaatcatgggacaatgccgtccgtgtcagtagctgcctgactagacttcatgtccacaaaacgaattcgggggtatacttacacggtgtctcgtggaacagaacccgatttggtattgtcagaccgtgagctcggctttgagacattcacggcatcctggggaatggaggccacatttccggcttcaggctctgagatcgcctgggtatctccaactatatccgggggcatgaaaccctcatttgtagcctccggctctgggatagactggatatattcaacgatatccacggggatgaaaggcacatttccgactggaagcctttgtctcggcctggaacgaggtcctcgatcagcgcgttcgaaccagtgaagcaagtcacgactgttaaaacccatagcgccattgtccatgcccggttcagaggaccccttgctggtgctgctggcctccttgctggtgctgctggcctccgtggtatactggtctccggtcatgccggcgacgccttcgttgcgaacatgagcgtgactgtcgttgcctgactctgtctcaattggattggtggaagtgctaccgactgaatcttcagtcgagctttcgatcgagctctcgtcagttgcgacgacgtcagtcccattatccgaatgatgctcggtcgattcagtattattagacgaaaggaacctgggaggcgcgtatcggacctcgaggtcgaaccggacacggcgggtcactttgatatccgagtgatggtcgaccaaatcgacgttcgccgcggaatcggttactccagtatccgacctgatatcattgaatccaatgtctaccagcggtgcattggtatcggcgtccgaagtcaagttgatggggttagggtttgctgcacccgcgatctcgcggtccggcgtcatcgcgttcggatggacgtttcgcgaaccgcgccccgccattctgctgtattttattaatagtgcaaaatgattttgcgatataatacttactcaacggagctttcgaaatatcaaaaataattaaatgtggttggtggcggtggtgagagagcgttgaaggtgagattcggatgatggactcgatcccgattgaaatggcgcgagtcaagcccatcggccgaatatttcgcgttgagcttggtggagcaaacgaaagttctatattgatatctagatgtttgcttagatgtttaaatgataccagtgaactcggtactcagtatccttgttcatcagaagatctacgaattgaccatgctgcatcaacttcaagtatataatgtactatagcgagttgctccaggcaaattcatgggtatagtgacatagtgagcttggcctatgtatgtaggtaggtagaaacaccatgatgtgaagggttgaaactaggaacagttatatttcaattttatgtcgctggacaccgtttaccagtctattggataactgctctcctccacttttcacctggggctagtaattcgttctggtaaaggcttagtccaacgacctaattctatggaaccatcctaatgccgggctagggcaggtcaaggcccagcttgtggtgatgttggcgaatgggatactcatatgggataagcctgtccataggagatatttggatgaacaacggggtttaaagtcaaggggacattgtatttgctctgtcgtgcttgacatcaatatcgttaatgtaccactcccacgttatacgaggaaaagttgacaaccgagcaccagctcacacaaactcagcagctactgacaccactgcatccatctcagccggcggagaaggacgggcagcaaactggatgttctgacatcttatcattaagaaggagttgctctctatggacgcacaaattttgtacataatcccgtagcttagcacgtcccaataccccaaggggggtagacggagtacgggctacgcccgtccctccatggacgttaattaatacaacaacaacaactactacgaggaaaagtcattttacacgttttacgcattctagccctctgatatactgcctaccttcctcaccttatcaaaattggcatgtcctctttggtaatctaggtcgccgaagtagccatgacctccagatgactggcgatggcattggtatgatagatcttcccactaccttctatatcaagtcaacaacataatgttatcaaagggtagaggccagatacagttcttgtctactatggattgggtcaagactccagcactatctactatcgagtttgaggtggaagtcctggtccaaggaccaattgctaactcgaattggctttattgagcagagacttaggctagcaagacacagcgaatcctcattgacttgttggcttctattgcagatggacatttttctcaaaggccatttagaagcggcaacacactggttggagtacccaaagcagaccaaagagatgggcgaccccgacaatcctttgtggaatcccgtaaccctaaggcaatctgaactcctgctgtagatagtggttcacttgcactaaatttcttgtcagccatctgctaatatgtttgaccatatctagtgagtgaggagcggtggacttacctcgtttccactgcagctcccttgtcccgggcagcaccggaatgtgccgtcattgcagtattgtcccctttgggagcacccaactctcgcttccagatttggaccggcttcggccattgcgaaggcagctagtgcaagcaggacaacaaacagcttcatgtttgaggaattggtttggagggagtgttcagatttgtttgttccgaagaattaatgtagaagagatgcactgctgaggaattgggcttatcccgcatgggcatcgagctttatatagagctgattctatcttgattattcccccaataggatcaatagattgctgatccgcagggctggacgcctgatatgccaacactgcggagtatgcattgctagttcgcaatttgaggttacattgcaggacttgaatcagctgatgctgtaatactttcaggctgaaaaacaaatagctcatagaacgtgcaggtctttactcaaacagcagaatctccgtgcagatcaatgttggcatctttggaatacgagtgaacatccatgaggattctccctgcatgatagggttatgcacataagcctgcacgagtcgtagggcggagcctcctcataccgaaaggggagagacggagcgcttgatatcataccgtacaatcgaggatctaccatagaagccaaaaggggataaatggagcacagatatcatatagtatacaattgcaaatctactataaaggcaggcacttcgcctccaatctacctcaataaacaatcatcactttatcatatccgcaaagatcaattcctacccaaagcccaactacctacccaaaaccaacaccttcaaaatgcgtttctccgttctgactcttgcaactatccttggcctggcatttgccgcgccccttgaagccaacaaggacggggagagttccgtgcagaccaacaactgctacaccctctgcataattgatggtggagtgagttcattccgctttccttctttgatttttggctaatattatgcaatcacaacagagtagccagcagtgtcttgagaaatgcaagaacagctaggcgcagcacactgtcacagagaaagcggatgaatacaacgttggcagccaaaacggccccggggtccacgggtctcagcctggttctgtattgaccacttgagctttctttatgcgcatgtatggagtagaagactatgattggttgtgttgtcttatattgttggttatttgacctgcattaacgtcgtttgttgtactttgttgtacctggcggtcaagccatgggtatcgctgccatcatcaagatagtctgaattgcacatatccaacacacatgtctcttttttctaactacctaacttcaccttgataattacttaaacaatttataggccattaggctaagctgtactctatggccaatacgtaaggaaaatccggtggatagaaacgggagatcgacagcgtctgggctgtgttgagcgccctgaaatatgtacaatgttggagggaaacggcagagcacccaaaactgattccttggcatatgcatgcttactgtctacattagtactttgtatgcgtagggcaaaatagagaccttaatatagtttgaaaggattgcccaggatatccaggtcatcgacgatttaccttatgcttttagtctaggtatgcccacttgatgctatctgagtaatgcaattccatagcaaatgacacgggtatgcgatcttctggctcgagttcatacgacatttttggcccctttctggctaaataagtaccttgttaggccacccgtttcagcccccccagcgaccttataaatgctttggctaaagtcccaaatcttgcattaaccacggagcggagacgcccggcttatgcgcaagtcttctacgtagctttctacccctcaaatatcgcatactggctggtacagtgaattaccgttattatcacttggagctatattatatcgtcttaatacttccatctagtttagctatcacgtaccgatacagttaaatcggactggatagagacacattccatgtagtgctcaaacactgtagaactagtactcctagggcgtaacagtgtctctattaagtttggggtagtacggagctcggaaggctgaatttggcaaacgacggattctcgggtacgcccgtggttggactctcagcataatgtaaggggcttagcataaaggatcgacaccatctctgccaatcaggtctccttctgatagcccttcatcacttcataacgccgaatctgaataacctgcatcaatcccgcatcagccaataactaccaatccttcaagcccaggcaactagaaaggaatcccaagcctaggacatgattcgataccacccctcagttgaatggcgcacgattcatggattgtgatacccaatgctgatcatatgtcccagtctcctgtatagttgccttcctgatagctatgtcaggttcaggaatggggccgattcgatatatacccctcattcagaatggggtgtacccaaagaagatatataactatgtagccttctgtcttgctacgagaatctatttgatctcaacttagtcaatccagtcaaatcttcataccaaagactccgtcaagatgaagtttatctccgtcccggtcgctcttgtcctctctctcgcgatgcttgcggccgctgcgccggctgagctagacaaaagggcgtgtaccgtgaagcaatgcgccgccaaagatccgcaacagtgctgcccggataaatatggattctgcaataccgatacgggtgaatgccactgtggaaaggattgcttcaagtcctaagtgaaggtaagttattgagctatactggtctcaaaaggaggcaaggttaatcaggtgttctatagcagcgaccgcaaactgggcagatatagactctcgctatggaatggaatgactagtcatgcctagatattacggctttaaggagaatggaatttatgtgattggatcgggtatggcagtattcgaaagtgaatcaacatcgtgggtttacgtatatcaagtgtgagttcgacttgcgttaaagttgataacagtagaaatgtagtagactacgtatgtaacagaaagacctggatatgaaaagatcatgcccttagctatctgctcccaaagagagagaggagaaagggtgtgagtggattgaatcgtgtaaaatgccgctaccggctttgaaatttctctcggctctggaacgccaacaatgtcctgggtagctgtcaagtttacgtgtgttatctccagactggtttagaagaaagactatttacatcactccaactgaaaagacccgaaaacatataagaggtaaacaattagtgacacacaatagggccttacaagttaccttcgtacggatggacagtgatgatggaacaagatatgaattctatactaactttggtttaccggtcctggataaagcagaatatcacttttcatcacagccagcggattcaatgccacacaaggcagatcgggggatgcgaactcgataaggaagtcatcccctatccataaatctcaaatccatctaggggacctcacacctcaaaggcttccacgacgagggaatgaaacaccatcgactgccgggtggtcagtgaaccaggacaccttatcaccagcgccctggttgaccagagcggaaggaagactggagccctcctcaagatcgaaaatctgcttaaggatctccttcttaccgccgcccgtcgcgacaaaggcaatgctgatagcgtgggtaacaacaggaagagtaagggtaatgcgcttaggcgggggcttgggcgagtttgtctcagcggcaacccaagcgtccttctcgcggagcaaagcgtgaccagggaagagcgagcaggtgtgaccatcggggccgcagcccaggaggatgagatcgaaggcgggcaacttgacgctgtccttggcggcaaactcgcgcatcaggtcctcctggtagaggtctgccagttcctgagggtcgtcatcgccaatgtgcttctcgtcgatggcgtggatgattggggtgccgagctcggtggggatcttggagacgagctcgtcgttcagcaggcggtagttgctgtcctcgtggttgagtggtacggcgcgctcgtcagcgaagaagatgtgccacttggagaattggggggtatcctccggggagccattgctggtggcgaggagggctttggccagaacggtgggcagggagccgccggagacggcgaggcggaaggtgccgtgccgggagaaagcagagttctggcagcggaggacgtagcttcgcaattgcgtagctagctcgtccgagttgggaaagctgtgaaggttggggtgtccggtggccatggtgatgtgtgggtggtacaagaatgaggggcaggagatatttttggcggggcaagggccgagatctaaacgctttttggctttggcctccagagatggataattcaacaagtctgtaacgtagtcagttacttaagggagagaagttgaagtgccggattgaggaaatatgacgtcgctggcgaatgctatcgtgtccacggttctattcgtggaaatccttggatttcacccaagtgggatgtttggattgtccaatgagttcgcccggatatccgctgcccttccaagggttggccacaccttattcgacttcctccctctgacttcaatgagctaaaccagtctaaagcagtctaactgggctagctgcatgcccaggtgatttccaaacttggtatgtaagcatcgtgccgccctgcgcaacattcaggagataagaaaatggccacatgatcttcatttcgattaatttaatccaaacagttcaaacatatgaatatgtccacgggtagatttcaggtatcagcctacttttaaaaagcgagaaatgggaaatacattctatatgtctaaatattggggtgcggttggcacgaagcccaagatgcacacctacgtaaatgtacatggatagcgtctcccacaatattcccctttctgatttagttctgttttgaatcgagtgggggataattaattttttgtctacgatatagtacttcccactaccgagacccatgttctacctaggtagtattccgaatgtcggtaatcaaggatacacttgaaaatgccgaagatccaattagataggggaaaaagagaatgcgtttatcgccatctccgatgggttaaggtttaggtagcagagttatgcgaatgagcgcctaaaagcagcccatacgtagtcctacatatatgatcggcaagagaatgggggggatacggagacgccgtgggatacggagacgccgtgggatagggagaatcgaaagaaaatcagaagcaatttaaaaagctggatatttccctgtttcatatctctatccctttcctcaagtcaaatcatcatcactcccaaaaaaaactggggtaaacccagagatcacggggccgctcgaccgggtcaactcaaaaacatgcgataccccccctgctccccttcagatcctcactcgcggtcaaattctccaaaaatgagctctccagtgcaaattactcctcaacctcagacgggcggcgtcgctcgtccatctgaggccacttctccacagactctcgacatcgtccgatgttcccggtgccaacaatctctcagcctaggccaatcaggctgcagcgtcgttcaattcggcatgaactcctactactgcagccgatgcgcaaacaaagtcggctttggaggatgaaacgaacaatatccaaaccacaataaatccgaaaccaaagccaaaacccaataccaacaccaaataaagcggaggatctggggatagtggttgaccggatcaacaaaaaccgacttccaaacaaaaaatcttttcccccgtcgcgagggcagatgcgactaccattccgaatggcacaccattcgatcccgtctcttcgatactttccttcgttttcgacttcgcctccccggttcgagagttcctgtgagattttgtaggctgtgctggcacagcctactcttcattgatcgcgatttaagaataccgatgaagtttatggaggattacactggcttcggtcaactggatgttcttgtctgagacaccgatggcagtctggggatctttccagaaccatggggcttcggacccgggggagatcatcacatttgactcattccactcggtcggcattgatcatacatatatgttgcatgtcggattcttgcgccttttgccaggtacaagggttctctttgcaagttcaacaatattcataagcggcaatgctgtttacattttccttttctatgcatcttgtatcatgttattgcactgcacggagctgttcttatggtctcttcagcgatcacccactgggtttatctcatctgtttcaagccacactgtctgatatcacatcttcatcgagtttagaatacttaacttcgtcattctatatgaaatataacgtataaacatgataatttttccataaataaagttgccacccatttccagacaaatcatgtctgctactgtgctccgtcggatgaacctgatcacctgcatttgtcacccggggaatcccagtcccccgtgagagaataaagaataatttatgatatgacatgagaaacatgattcagaggaattttgccacattttcgccagtaaaagaggctgtagatgtgcatattggccatgtgatctccccggcccagggctttggtcgcgtaccgtcatagcacagcttcgtgccacatcatgtaaatcgtacatatttggaatgtatgtgtctccctatggggatttccatttgccttgatatggtttggacagtcgcacatgtcctgtggcatgttgattgtagttattaaccccgtcggacctggccctggaaggaagggaacacagatgaagatctgtttgaagatctgtgagacacatttgcatattctcactacatgtagacctgtacgatataggtaggatgttaagtacacgagtattccacatacctgactgggacctgcagtgtgactatcaagggaggtaaacggagtatgcacataataacataataatccagatgaatttgacccttaatagtaacttttcatatttatctgcaggtactttaagagcgaaaaatacgcatggaaatcaatagtcgaggtaattgatccaaagggaaattcaataactgcaagatatgactgctcatgatccgacccgctctgatcgatgatctctataatttctttttcctgtggttatttcatttctgtccattctttactttttttgtttatattttttgctttttctccccaatccgatctgacaataagatacagaaatcaatgtgttgaatacaggtccaatctgcatgttcaatctgcatgtccactctgcatgtccgatccggatctagcggtgtaacactccattctctgtattaagtcgagggcatccttcgagctttgcgtgcacggatatgcccggtacttgatggagattatgatttaaatattaatagaaaaggagggtggagagcacatcttacatgttaagagtggccactcatacaatgcccttaaggggaactatacccgggatggtgggacggtagaaccactctattgcattctaatattttggcagagctgagctcatggtgaaaatgacagatctcagccagaaggagaaaggggactacttgttctctgatattactggctgttgctgctcgactggtgtcgttattcgtccaaattgtgcagttatactgggtccccgtgatttttacttgcaagccataagactatagatcattactagtaagtaattaattgactatatcatatatcatcatagcaattcctgtgaaaccctcgacgcttcttctctcttccaagattgttccagggctttataatctgctcgacgttcgtccagctcgtggaggagttcatttcttttctttgcggtttgtcggtcaggccaagttttgttgacttgcatttatcccacaggagaaaaaaaaagcaaggtatgattgtgcggtttccaagtattgcacatcgattgcaccttgatacttggtgatgtcgttcttgtagtcattctagcccaaacagtgtgggaattcgagcgtaccgtcatatttatatactctgagctaacaggcctctgacagcgagtacaattgttcaagttttggactcaaccagacacctggtcggacaagtcgagccccgactatttcgcaacgacggaccgggataattgcaagccttgaaatctatcctttaatccatacaaactagtgcgctttcggaactgaaataccgggggatattgtcttgggatatctgcagccatgcctcttctcggtcgtgataaagctcgtcccagatctcgcaggtcggatgatgagttcgtcgtattccttcaaggcgtgagtttgaatggagtatatcaaactaactcaatgactaactaccattttagatcccacctcattgccgctggcaagagctcaaggatctcgttcgccaaactgcactgcatattcgtcaagcagtagtgtacgatgatagccatggattccccaccggactcggccaaatcatcatcaaaaatgaagacgaggcctggcgaacgtaccgtatgtattctaccccacaaatccccaatactccgccctaacaccgccacagatcgactctcgacctgcggatgggacggccagagcctggtcgtcacactcgcgcggaccagtacgcccaccaagcccattgccggacctaccagaagtccagcaatgatgccaggctacatgtctggccactcaacgcctccattagtccacggaaacatggcaatgcctccgtcacccgtctcaccagagtgagtttaccacattcccgagtatgaagaacgaaaccaactaattcccccaaggtcatcccatcccaccaccccaccatatccatactcagagtacggcgtcatgatggtaccagtaccagtgccacaaggcttcatgtcaatgatgcgagatccagacgcaccaccgatgcagtgtttccccccatccccagtaatgaacgcaatgtacgagccgtggaacatgatgcaaggctacccgatgtcccctccacacatgcaccacagcgagactcccccacagccctaccagcactaccaccaccgtggatcttccgccaaaggcacgaaccccagttctccgtctttctatccagaccgaagagctatcaccatcgagaacttgaacgcaggtactacatgcgccgacctgaaaacccttctgcagacagccggcactgtccagaaatgcagcatagtgactacagactcggccgatggcaaaggccggctgcgtggctggatcaccatgcaaacagcagacgaagcccagtgcgctgtgaccatgctcaataatatgagttttatggggtcgcggattaggatcaaggtcgatcgaagctcgcatctcacgcgggctgcaagtgttgatggagtgctgggtgcttgtgctggttcagacaccgcgggatcggtgccgggaaatggggatacgtgtcagtcgtgggctgatgagatgactgcggaggctaatactgttgatatctctaagccgctggttatagatgggtctgggttgaataggtcgcctgggggtttctcgacgtctgcgcctacgtgatagagtggctatgtaatattcgtgggaatgaggtgatattcaatatacaacgttctgcttgctttactgttttattggcttttgtcagtcggtactcttgatcgtggtcgatgtaaattattctgtgcttagaagttaggttcttttgactatacatcctctggcaaaaggttattctttcagtaatgcctacatatccatagacttcataggcaggtccaccagtggccgatctctcaggtccgtatttgcttcacttgttcctaacgatgtacttttgtctcaagaatttcccataggtgtctccattcactcttcccttcccaaagaccgcactagatacaaatccgtataggcattcctatgcgggcacaaccttttcccagacgagagatgctccaagactccctcgtcctcacaatccaaaatccaagtccctaatcgctccctaccccccacagccgtcaacaaagaaccaaccaagacaccaatcatcctcggcccaaaagtcggcttagcagggcattcaaaagggggacatccaaaaggcataaaagcatctccctgcgccggcgtaagagcagaccagcgattcgggttgaatcgctctgcatcagaaccccagatatcagacctcgtatgacatccctcaatatcagcggacattatttcatgagatgtccccgtaccctggtcccattggtatgctcgatgtatgtgtctcgtaggcacgtatagtcggagggattcacggactatgtaattcgcactaggcgaactctgaccaccacgtgtatcgactatgctgggataattgctggattcgggtatggagaggctagacggggccccggaggctgcgtcgaattgctttttggtgggcttctcggcaaaagcaatcatcgtctcccgccattctggtacttctttcccagtgccgaatctgatttctaggaaggaacgtaacacgacacgccacatcgtttcgaaggaaggtaggatgaggttcagtgggttatcctctgagctattgtgtgtcccgaagatattgacgagcgaggtctgaagcaatatatcgtcttcgaatctgggaatgtcgttatcagtgtctttcagcttggaggatatccagactcgatttatggactgtgctaggtccagtagattctcatcacatgtctggtcctgggtctttttgttgaacattagccaaagaacaactttcaatgaaagtatttgtgctagactggcgacgttgacccgattgcagtcgggcttctgtttgtctttgggagaactgctgcaacagctacgatccaacccgggaaagccgtgctcgatccagcggcttgtggtaactctggcgaattcggagacgctgtgccactgctctgccgatagattgatcaagggtttgactttctcgacgaacatgctggcatggacattatctgtgcgagtgaaggcattatcgattccgaaggcgattgggagatgtctattggctattgctttcgattggtgtagcgagagggtattcggctgctgcttttcgatgtgttttagcaccccggcaatgattttgcggcatatggccgggtcattcgatgaggaacgggtgtgctgcctcttgcgccatatcacaatcacgaggagagatatggcgaggatcatggatgttgatagagcggacgacattgatttatttctctgggcaatgatgtgttgtagagacggttggtccattatacagcgatacttataaccttggaatgtagacgataaaaggagacttcgtcgtgcaggtccgatgtctcgtttgcttttggctcaatcatccttttttgtctttagatttgtaggaaacaagcttggaagtagcccacaacctggtcccaggttccttgcatgggaagatatgcactataagaccatggcaaacaattttgttcttgaggaacagggaaaagtagggtttctctcttcaacaaacgaacaagggaagctgcaggttccgaaggaggtgaggattggaattctgaaagggagaatcatatctcaactgaaatgcattctcaaaaaaactatccaatattggtgtacaatcatcaattcattcaaacaagcgtgtggggttcgtcaatgtaagtctcatatcccatccaatcgccgtacccaattattgcgatcaatcatatcaaaaacgccgttatgaaacccaggtagtatgacatttatttctctttcggttggagctaccgtgagctcaggctgtgtctattttgcatggctaatcatctctgcataaagatcctctgggatcttacggacgaggagaaccgtcaaagcaatgatctcttttgcatccagaggagggaatgagcggagaattttgtttgggctatactcaagttagcttttgttgaagaaacccaaagaccaggcaggcaagactcacctcggactctcgaaaattaggtccctcatacggattagctgggcgacaatgcataggatgttcaggtgtggcccgtatgcaaataagaaatcccatagatgcaacacctccggtaatggaggcgtacaagcgcagagagtcaacaccgatgggaatgcatacagctcggcgtgcatccccttggagaacagatatgctgcaagcttgggctccacaacctcaaggcatcggtcgactaaacgaagacccttgtggacaccgtccatagcaccacggatataacctggacattcgcgtgtgacaaagtaatggaaaagagcaaatgcctccacctcgctacgggcagcatataggaatggcgcacacaagacattcatgccttggacgtacatggccgaatcacttgtagtactgttggtgaccttttctagctccccaccgaagggggactcctctgaaatgctgggtggtgcattcactagaagctccatctcacggcgccgagaagacggtctcgaacggggtttcggcctggaatcatggagcttccatgccacagcgttgaggagtcggatcaagcttgcttctgtgactcgacgtttgaagagagggtctgtagctagtgtgcggaaagtgtcgttgcgaattttggcataagcgggggaacggccgcggtggataagagcaaggtagtcatcggttggcataggaggaacgttgaggaggaccaaccacaggtagattcggtatggcgactatcattgtgaagtgttagacattgagacgttgcaaaacggactgagtatcactcaccatgccatctccgtcagcatctactctgctggataggacgaggtatttgagctctcgcagtccctcgtggggatttgaactctgtggtccatcgcgcaagagattctccaagagcgatcgctttactccaatcccggaccctgttttccgcgcgggtcgtctctgattcgcaggtggtgttgctgccgcttcgcgagaagctgcgtcgctatttgatcgagctcgacgatgtgcgcgcgctcgggttgcagcaccaggagttgctgctgactggtcagcttcatgggagccagcttggcgagaggcctgggtctgggcaatgagcgcgctagaggttgacagcacttggtgggattggatctttcggagggttcgcatggttcgcggcgatgcgggtgtgtcggggcccgggacgccgagagcccaggagggctgaggtttggccatttttctgcaatcaagtctgcattggaaggccacgagcagacatctttgggaaacgaggtaagatgaacgcagttgacgggtggagtgtatcagatcgcggtggctggagcttttctgccgatggaatgcggaaggtgttaactccgatgtatacttccacttccacttttactatttacctagttcactgcttttgttgaaaattcccatttggtaatttaataactaatggtacattatcatccatgacaagctctgtatagtctgacctttgcttctacagccttggaatctgtcaactgtcaaaaacattataagacgaaaccccgtaacgccgactcaattgaaacccatattcatgatagcagttcatacatgtgctgcctctccttcacgtttcgaattgtttccattctccccacccatgacgctgcgcacgaagtcgtgatattggaaaacctcgcctctcttacccattccgcctgacttcgctccccgaccaataaatgctgggcgccctgtaaacccactgaagacttcgtcgatctgtctttcagtcaatcgttcctctccatcttctggggaggtatgtaatagagcatcacgtaattcagcggcgtcgatttgcccgttgtcgtcatcgtcaaacgcagcaagggcgttgagaagctcttgagaaggcgacattgctgccatcagctcagaaagtgtattcaaaaaggttggaaagttcatagtctggcctgctcctggtgggaagaagcgcgacagcgtcgagggggatgagtcttggcctgttcaaacacttgcattagttcctcatgccagtttcaaaaaggagacaggttgcttcctacccaaagttgtcagcacatcagtcacatcatctttgtccacaagcccatcgttatcccgatcgagaacctggaaagcttctctgatctccctcacttgttgtgccggtagctttccagccgcatcgcctgctgggcctgtaaagccactcttctttgtcccaagaatcggggatgagctgcctggcgatcgtgctcctttcgtgggggaaggagagagctctcttccaaagttcggctgcggaatgggccgctcgctcttcggagaacgcgactcgccatcctccactgtatatgattgattgagcttgctgggggacaccataggtgtatatgcccgactaggagagctccccggcgtccctcctgtacgactggctgagggcggggagtttggagtggacgggcgccggaacggggatgccctcggcgacccaaaggataacggagatggtttgaatgtgggattgttggcctaagtcattgtttattagactccagtatatacattatctctcaaaaaccccacttaccatggtggaaatcgcgtgtgagctggattatgaattgtaaacagcctacctaggtatgacgaaggcttgcttatcgatgtaaacaagccgccggcacaacaacataattttgccaccgtcttccacaccgccctatgttatctatatgaacctacacctttttaacctctgttgtataatgtacgattttggtttgaatatttgtatttctgccttaatagataggcacgtcaagtctgtgtactcctatgatacaggtaactcagaatccggctgactagggttgcatatgcgacttggaaatgttcgtagatctataacgagtcatactcgtcacatgaaccatcaattggcttccaaggggcctaatttaaaggataagatgactgaagttaagtcatgtatttcggtacctttctttctgtatacttataaagcacattcaagtgttttgtgacacaaggttccttacgctactttatatggagtaagacattcgaggagtggccagtattgtttcatgttgatgttttcatagaagtgcaacaagtcggtgtggcaaattttctttgcagtatgttgcataaatagaaagatctccaatgtatgcaaaggagggagattgcattctgatagatcatcctctcctcatgttccttccaaggttccaggaatgcccttatatggatcccccttatcggcccttatcgtctctccactgtggagaaatcgccctttttcttaacccctcttaacccctgaacaactaattcgagacaattaattcaattattattatcattggcccttgaccttgcgctttctcatcccggtatgctactcgatttatagcttggctcggagcaatcctctatccccaactccataagatggcaacaacactaccgtatcgaccgtcgaacgactccctctccgcctcgaataaccgccaaacaagtggtctccctcggctctcgcctgcggcctcctttatcggacgctctccgagcagttcacatggctcttttcgaagaacatccacagagaatgcgacctcaagcttcaggccacgccgctgcaaagcgcagtacccgctcgactccccggaacgccatgtggaatacatcctggttgcgtctttccatattgatcgtggcccgatcatggagcaccagtatcccgctgcaatcagcggagacgagagcatgcttgcagagctgatgctgccggatcagacgcatgtgcggagtcaggattggactatgttcttcttacataaagataccagtggcgacgaagaaacggattcagcggacggaaagaagaaaaagaagcggaaatcgcaataccatggaaaccaggcgggagccgacattcaggacgagtacctggacgacatctccgatgaccccgacagcagcgatgacgagggtggtgaagggccacccttgatgtacgtgctgaaccttgtcaacacgaagcaggataacactgtccgaaggtaagtcgctactgtttcgtctgaatgtgtgagtgctaacagcgaaaagaggcgcagtagtcaaggcaatggcaatctgtacgcgacattcattcctccacatttataaagtaagctactatgacattcctagccctatcgcgcaggcaattctgactattatacagcctttactcctcctagcgctggaggactacttcaaatctccattccccgaaactctggcatccctctatgatgccgttaacgccatggacctttcgttaatgccgaaaatgtcgatacttgagcgccatatcttgcaatctagcaacacaaaggatatgttcctggagaaattcgagcaaatgatccgccagcgggaagaagaagaactccaggatggggaatgtccgccgtcaccgaagaaagcaagccgatacgccctaccacgggatacacatgagtacgaatcgaaagtggtctacaatgacatccctatcccggtcaaaattccgacagtgatttggccggagaccgttggagacttctcccttatcaagctcattcagacgtttgccgtgccacatgccacatccccccaggctttccaagcgcatccccatttgactacaagtggaccgtttacgcatcccattattgttcttgtcaatgccatcctcactcagaagcgggtggtatttctaggacacaaccggccatcgggagaagttgcagaggcggtcctggcggcctgcgctcttgcatccggtggcattctgcgtggatttactcgacacgcattcccttatactgatctgtccaagatcgatgacctcctcaaggtacctgggtttattgcaggagtcacaaaccctacatttgccaaccatcctgagtggtgggatgttatgtgcgacctccccacaggtcgcatcaagatctcaagtcacgttgaacctgcacccgtaacagaagggcttctattcttccagcagcagaattccctcttacctaacagtgcatctagcacgaccaatgacccaacaggcgacacattattcatagaagacatcctccgcagtatcagccaacgccacggcgaaaatgcggttcgcgcaaaatggcgagcctacatcaccaaatttgtccgcgtcgctgcagccttcgaagaagcagtctacggtgcctcaaacctctacatcataggcccaggcgaagaactctccccagatagcccaacaggccatcaaaccgatgcctcagacccaacaactctccgcggacacgggtacgtatgggtagacgaggtagccaaacagcgcgagctctcagcctccgtctcccgaatcgaaggctggcgcaacacccgctcctactactcctacatccaagacattgcagcaatgtacttccccgcgcgcccaatccaacgtccagacattcatcaccaccacgaccgtctccgctccctgaaactctcccactccgaagccgccgcgatatatctcgctctctcccactccgtcaaagactacgccggcatctgtcagctcctaaccgtcgcaccggagaaccaggccggtctcttctatgtcagcatgggcctctttcatccggaccaggtcgtccgtgaagcgacagctgatcttctcggacgtatcgccgcacacccggctggccgccatttctggtcgcatctcggccgcttcgcgaagttggggtacattcgtgtcaagcgggaacaagatgccgccacacagagtcctatttctggtggcgggtcgccggttcctacgagtcctggggctagcttcgggggcgagccgcagagtcttgttggtgttgctatgggaggtgggatgaagaggaggagttgatgatatattgtgttggtctttttttataacattttctgtcagtgagcgttttgccttgttatttgattttgttgctatctttgctatatatgacgaactctgggcactcagaccattttcagatgcgatttatctgtcttgttttattgcgttcatctacacgtggttgtggatatgcttgtgaatactcatatgtatactgtccggcgtctgaggaatacatttgacccggtcattttggcattagcgaatctcggaaatttaacaaagacaatataaacaatcgagtcaacctgattaggtacggaagtaaataaggaaataacggagtgaataactgctacaaagcaaaatatggacaatatcactaggaattacatacaatcaaaccagaaagccaaaaatacgctcgctgacatcaaccatggccatacccacccgggcagacggacccaaaaagataaacaagaaaagagagtgtatgaacaaaagcagaacagaaacattcagatcaaaacagacctatcagcatgggaccaagaaccaaggccatgacagtagcaaatccaagatgaggcaagggaacagcaagacccgcgccagccctaacatccaccgagccaagagtgatattagtcgccgcaaagccatcaccacaatgcgcattaacgatcttggcagaggggagataagtagtatcaagaggctggccatcccgtctggcccatccggagtagatatccatagtctccttcagacacttattacaagttggcacactcccaacagtgagcggtgtacccagcggcacgaggtagacgccgtaatcatccggggcagttgaattggagacggcgtcgacgaagcagtatttctgcgtcgacgggctcatgagacaagtggcgcggtacattggttcgtaagcgacgagatcccgatacgtgcccttgacgacggagttaccgttttcatagtcgtcgccgcagttgtcggggtccagtaggtccgctgcgagacgggtcatgatggatgcgcatttggagacatctgcagagcaggatttatccaggatgcgggaagtggcaggggcagaagagagggtgtggaagaaggcgtttgagttctcgattaggagggagatggcgttgcagttggagattgttgtgttggcgcgccatttcgcgaagaagtcgatgcaggtgcttgcgttggcgaagttgtaggagagtgtgtcgaagggcttgggcattcctgttgtggtggaatctgttgctgtgacgattgttcgtcggcggactgtggttgtttcctctgtggatggtgatcgacgatctgtggtctctccacttgcgtgccaggccgatcgtggcacggtcagtgttgtgggttccactgattgggcccatgcgggtaattgacagagaatagaaattaggattaggaggttgtagatatggtaaagacgggacattttgggcgtcgtcgacttgaggtcgaggcgaggacataaacagtgaggtatgaattatcggagcaaggacagtctttgtatgtttaacgagtgacagctggggcgtagttgggaaacaaagaagtgtgttatttcagcatggcgtgatgagctagggaatgaatgacgataactcattagaaggagtgactgaggggaatgccctagaagatgaagatgaagatgaagttgagaagcgaagtaagccccattaaccctggaagttgcagaaaagcctaaaatgggaccttttttagttcccaaggccgagaacctgccaattgcgctagagaactccgaaggaacactagcacggactagaccgttcggtgggactttgggttcaggggctataacagctataacagttgggagatagagaatatagagcagatccattagtccaaccagtcaaattactcggaaaagacatacatggatgtagtactccgtatttagtacctttgtgtctccagatgtcgtttcccttgtgcttttgctttttcccccggttcccgactggactatcattcggtgattctgaaactgagacatgaagtagtatgtagtataaagtacagccttggaagaatagaaaggtaaaatttaagagaggtcaaccttggaagacctgcccaggtgatagggtttatagggacttgggtcgagttattcaatattgacagattataacctaattgatcccattgtcctatatctacatctatatgatagtacaacataattatcaagatattccctacctaggtacatatgtaggtagaatacaatgaattattctttctcgacgaattcggttctcggagccaattaggtaagaggaatttcggcaaatcatccccccggacccccacacagagtcataacatacttgatagacactctctgtcaattcaacttaacttgaactgatcatggattcattagtaccggagacccgtgttctggctgttgctagccacgtaagtggaactgcccactcctttagatcataaactaacactccaccaggtagtctatgggtatgtgtcgactctgataacgcggtttatcatatctagaagacgtcattggactcagtcgactaatacctcttctccagccatgttggaaatacaatggccacctttgtcatgcaatccctgggctgtgaagtcgcggccttaaacaccgtccacttcagtatgttgcaacccggcctgaccaatccaaccctgactcacatgcaattgcaggtaaccacacaggctatcgccaattcaagggaactcgtgccaccgcccaggaaatttcagacctctaccagggcctgtgccagagtaacctcacagacttcgacgtcatgctatcgggctacgccccgagtgcagcagccgtggaaactgtaggcaccatcggcatagatctacaagagaaagcagagaagaagcccgggtcgtttttctggggtaggtaacactggctcttccccccacaaatactgacgctaatataaatataatgtcagtcctggacccagtcatgggcgaccaaggccgactatatgtcaacgacgacgtagtccccgcatacaagaaaatcatcccctttgcggatctgattctgcctaaccagttcgaagccgagtaagccacccgggatcaactgcatgtccccagaaatgaccactaatataaaataatatagaaccctctccggcatcaaaataacctcactagccaccctcgcctcagcaataacagccatccacaggatctactccgtgccacacgtgataatcacctcagtgcaactcttcaagctctcccaatcaggctcaaccccgtccccaccagagaacttcctaactgtaattggctcgaccacccgctccgacgggtcaccgcgactattccgcgtcgacgtaccagcgctggactgcttcttcagcgggacgggcgatatgttcgccgcgctgaccgtcgcgcgcttaagcgaagccgtctccgcagtggatggtctgcgcgcgaccaagtcgtgggtttcccccgacgatgttgcggctacggatctgccgctggctagctcgactgtcaaggttctgtccagtatgcatagtgttctcgagcggacgcttgagagtcgtgatgcggagttggcggttgctgtgcctgcgcgggagggggaggcctcggcggaggaattggagaagagggattatttgcgtaggaccaaggctgctgaggttaggcttgtgaggaatacgcggattttgcgggatccgaagattctgtttgaggtgcaggattggaaggaggaggatcttcctcaggatctgcggtagtctttggttgggttcatagctagggtttcgtatcttttgcatgaggcatggttgggtgatagaaggatttcggagggcattagatgaagccggatcggtccccatttctatatcaaaagccggttcggcctgtacatagatttgattattgaatcaagcatgaaatctttgtatcttttgttcattcagtcaaggtctcgaatgcatgtactcgtaactaggttcttttagaacccagaacccatctaattttcgtttgtcatccttccaaattcgtaccgaggtgtatggccttcaaatgccagtgctaccaaatccaccggcaccgcggacactctcctccagctcctcgacgacactcacttcaggggtgtagatctaaaccaggtcagacatactctcgcggcataaaatataatggaagttaagagcttacccgctccagaaccagctgggcaacacgatcacccgccttaaccgggaagtcgacgtcagagtggttgaacagaagcaccttgacctcgccgcggtagtcagcatcaatgacaccagcaccggtgtcaatgaagtgcttagcagcaagaccgctacggggagcaatgcggccgtctgtattcctcattagcatccctttcactcttaacccagcccagcctcaacaagcttcggtaaattcctcgggttcaattcccgtcgcaggtatggtcacgtacaagttccttcaggcacagcaatagcaataccagtgtcaacggcacccttgcccttagcggggataacagtctccttcgcagcgtagatatcgtacccagcagcaaaagccgagccgcgcgtcggagcctgggctgactcaacgagcttcttaacaagcagcgggggcagcggctgctggatcgatgtgacggcggcggcagtcattgtgtcaggttttgatcgtttcggcagcggggaggcaggcagggaaggcgggttgtgggcggggagggatttctcttggggtggcggggtggtctctttggtcatggtaaacacaaaatggttggaggatcgaagatcgaagatcgaggatcgagtggatagagtagtaaaaaaataacaaggtctcacagtgaattgggtcaattgacaaaacccctagcttcacaaaaattgcggtgagctccacgctcgacgccttcctgcgcgtttcaccgctgggacgcgccgggtgtttgctttgtttgtttcctccccgctctctctcgagcggtgacgccgaggagctgctggggccgaggtccccccggtcacgccgaggaggtgctggggcatttatgtgctcccctgtacatattatttttataaccatcggtcactttgcaagatacatacgctctttgcacagccttttcctcagttcatatccacaccatggcgggtgaagtgcgccagcctatagatattccctcgttggagaagtacattgaccagaatgtgccggaggttaagactccacttgatgtgaagcaggtgagtctggccccgtcaattaaaaagttggcaatatcaagcagaccaactaatatcctgtcactgtagttcggcttcggtcaatcaaaccctacctatcttcttactgccgctgatggcaagaaagtcgttctgcgcaagaagccccctggcaagctgctctcgaagacggctcataaagtggagcgcgagtataagattatccgggcattgtgggataccgacgtacctgtccccaaggcgtactgcctatgcgaagatgacagcgtgatcggaaccgcattctacatcatggagttcctggacgggcggcatttcaccgacccagcgatgccaggagtgagcggggaggagaggaaagcactgtacgtcaccgaatgaggctccaacgcagacaccaagcacccccagccagtgcctcctactgacaagcacacagctggaagaatgcagtacaaacgctcgcgaagttccacagcgtcgaccgcgaaagcgtcggactcgaaaccttcggcaaaccgacaggcttcttcgaccgccaaatcgcgaccttcaagacaatctccaaagcacaagcggccgtcgtcgacgccgacaccaaagaacccgtcggagaactcccgcacttcgacgacatggtgaacttcttctcgcaaaagagcacgcaaccactggaccggggcaccctcgttcacggcgactacaaaatcgacaacatgatcttccacaagacggagccccgcgtgattggaatcctcgattgggaaatggcgaccgtaggacaccccctatcggacttctgcaacctcaccagtccgtacataatggacggtggggacagccagctgtcgcagttcgcgccgggggttgttccagggctgccgcggcgcgaggaatgcattggctggtacgccgagacatctggatacgaaacgagctccgacgtggcgtggggcgatgcgttctttgcgttccggggctccgtgattatgcagggcattgcggcccggttcgctgggagacaagctagtagtgcgagggccagtgagtatgccaagcgggcgaaaccgtttgctgaggaggcttgggggagggttcgggctgttaagagggcttctgaggggaagctgtagtctattacactatgtacggagtagaaagtcgagcattgtttacttggcttctgggactgttgatagtgggcttttggggggtttcaggtttgaccttgtatatactcagaatcgaggcctggacttcacttcattctagcgccgtctagatgtagataggtgcatgtacaatgtagcttgacatggcccgatctaaatctaaatcggactcttcaggttagtatgtaaggctggtccagaaccaactctccactttgaaacaaaaccccactcgaggattatagacatggaggtcacaagcctagaacagctagattcaagtacttttggcgcctgacgtacggtgtaagcacttatcccgatggggataaacatttgagactgtatcgtataatatcctgcgagcatatcacgtttatgtacgccatttcacccgatcactaccgagggaagtagggatatataaaccctccaaggttggaagatggaataggttaaaaaaagaaaaagaaaaagaaaagaatgcaaagtacgctgaatatacattatatatagagagagaatagatacgtacggagtacaagatataagatatgctagatttaagagtggtataagagaatattgaaacattgaaaagaacaaggcgcggataggtgggaaggtggaataccgcattgtgtaatgtccgttgagccgtctgcagacaagtgcagtatgtagtcgggcagttatgattggacgcaaaagaggggaagaagggtgaggctttttctgccctgcggctctacgcgtaagtgaggctgaggggggtgaagaatccacttgtttttttggccttctaatatatatatttcgggtttttggatatcattaaatgttgagatagatggtttcaaattaactaaattgtcggattatccactattcactagtgtgaggggaggggatgcggctggtggaataataaggggtttcggattgtggccgactgggttggacagcacatctatgcagggtagtatagcgtagtattatggttattatagtagggggtattatgatacaatgtacgaagtatcgtgtagttctaatcgaactatatagtcattgacgtctttttaacgaggctctgaaacgtgggccggacgatcttcttaccgcagacagcgcgttaacaaccaaaccgggaaagcctgaagatcccttcgggttgacggaggctgacgaggcttgaatatgccagcgcagacttgagtctgacgttgcaaaggcaaaataaaaaggaccaaaaggcgggacgtaaaaaaggaaatggaagaaaagcgaacagaccgtgtgggccctccttcgtgcagtttccctagccgggtataacagactgggggagtggagatggaagagaggggaacttctctgagagacttgccccggttgttgtctccgagtttaatggtggagcctgaagagcagagagtagcggtggagactttttctttcctttttttcttctttttttctttttttttttttttcccttccctggtctttttttttcttggcttatgtacgaccaggttcaaatgctccgagtcgagtaaggtaaagtcaggggatggtcagcagagaaggatgaagttcaaaaagtgatggtatagcattgtaggtatacacgagatgaaaaagacaaacaatataactaaaataacccaaaaaagtcaaaaaatcttggaatacaaattaaattacagaaatcgggaaatatagaacccgaataataatagcaacccgttataaaccagtcacggtaaagtattcctggtaatctattatgtggagcccgagattgagagccctggagagccgcatgtccttcgtctctttccccctcgaatattccttgaaacgttgattctccttttctctattcctctcttcttttcttctccttcgatgtcttgcatctgatactggcattatactggtagatattgctgggccaaacttgcacgtgtagaacgtggtattatctcaccatttagactcttctttttttttttttacccccggacttctttctcccttaggcttttcctcttttcttccccaagatttactgtacagtttcctacctgcacgcttccttccgggtgatatcattcatctgcagatggcgcagtgacaatcggagcttttgagcctcatcccgggacccattcactacccgtccacctttccgcttgggtaagtcactttctgcagacctcgaaactgaggtagtctagagcttgggggctctttttctttttccctattttacatttctggttttattgctttattgcttattcctttgtcgcttttcttactttcttgttttgttgtttttctacctgggttcgtggcttcaaccctcagtcctgtttggttttggttttattctctccgggtcatcctgacctgacaacccctcatctccccatctcgacactttgcaggacgggcactcgcattgtgtcagaaccacttgcttgtctgtttttctattctatccacttagatcgtgccttcattcatctggtcatcgaagccataattacaataacccctctctaaccatatcttacaggctacttatcatcgtttctgatgtgtgattgtcaatctaatctgccagaccaacaacaagtataaggcgaggtgcccgatgcacctgctactttcttcatgatatcggccatgtatgattcggatgatgcttttaatcgatcgcctcctctggaggtgatgaaacccaattatggagaaaacgaaacaccaccaccatttgctcgctcaagcgaaaaagatgccgatgcagtgggttcccgtaagcccaaccagctgaaacctcagaactcaacccgtgagggcgaccgagtgctgatggagtttctagctccgtaccaccctgagattgccgcatcggcaaggacttcgccattggaaccatttcctgggaatctaaaaaaacatatgcaaccgcctgactttgatccaagagatccaaagaggtcgaatgcattcaaggatgatcctgcaccaaaggcatcgtcaccggaactcaaggcaccctcaggctcggcctcatgtactgaggctgagaagaaaaccccacagatgaaaccggccccagtcccattacagcctaagccagatattgagatcaaagaagagttccctccaagagagcgactcccctcattaagtgactcgacacgacgactctcacaagtgttgccccagctcaaaacctcaccggaaaaagaacccccaattctcccattaattcaaccccctggaccaagtgtcgcaaaatcccccaacagcagcaataaacaaacgctgccgtctatccataaagctctcagcgcattgtcagacttcggtgcaccaccagccagcacaatgtcatcacccttccccttctcctcgtgtcctggatcaactacatcaggaaatgattccccattcgaccgcgctttcccgggaaaattttctatccctccaagtcctttttctcacttttcgccggtgagcatgaaggaatcatctaccaacccttctccagcctcgcactcgtccttctggcgtggaccaccccagtctgagacgatgcctgtccagaccccatacgtggcttcccctatggccgccaaaagcccagcaaacagttatcctacgcccacggaacaggttggcgctggtttaggtgatcggcattcgctcgctgcgtccactccccaggccaatgggggccccgtgggcagttacaagtgtacacatcctggatgtactgccgcccccttccagactcagtatctcctcaagtaagaccaaagacgactcaagtgaaaaaaaccctcctaacgaaacagcagctctcacgcaaacgtgcactcccaagaccgcccacatttctgtccggtagagggctgtccacgcgcactaggcgggaaaggtttcaagcgcaagaacgaaatgatgcgccatggcctcgtgcacaactccccaggctacgtctgtcccttctgtccagaccagcaacacaaatacccgcgacccgacaatcttcaacggttcgtgctacgtctgagcctcacttaatttgacatcagctgaactcacactcacaggcatgtccgtgtacatcacgtcgacaaaaacaaagacgatcccattctccgacaggtcctcgcgcaaaggccgcttggcagcgcccgcgggagaaaacgaaggatgaacaatacatgatcctttagcctctcgctttgttttcgattctattacagcttacatcttgcatctccaacccgtttatttcttgcccatgttctttctatcccacccgttccgaccggcgtgtaccctcttcaacccccactctatcccccattcaaccctgtgtcccccgggtgttccagattagcgcctcagtacaacatgctaatccctcttcgaggcaacttcgcaactttacgcgtgacgaatttctcagccgtgataccttcctgttttttattttgttacctttgggtactattgttttggtgcttctgcaatgataccatctgtgcattgttagaaattcatgatgttacatgagccattcgtttaattggagcgttgtgagtctttaattttctactatttcatcgtattttttcaccttgtctgatcaattcgattggggtataaaacctcttctattggaattcctccactttggaaaataccgaaaatacattcagatggaaatctttcccccctgatgcaccataactgggagttggtctcgccagcttcactttaaatgcgcgtatggtccaatccgatttgatacttcctcctttcccagtattcaacctttcggcccttccatcaacctggtgggaattcgaattatctccggatttcagactataactggtttcctcattccacgcacttttccatcagttccatggcctcaccatgtctattagagtttcccagccgccaagttgttttttcctgtctgccgtgataatccacgcctagggcctttcttccgtctaccacttgcgccacaatcgaatcagccttctaccgctgtactaggtacatattcactacatctacatcagattagggtttggtggcttgctagccgcgagagcacgcggaatatccgcataggaagaataacttgcatcgattctagttctacaagtaggaaggtgaaagttagcgactgcaataatttgtaaaagaagcatccaataattgagtctgaaatacgcccacactgccttcagattcccggaaaggaagggataatcatcgaaacaagtatgggagcccaattatccctactatattgagtgcacacgcagagaagcctgagcatgttggtcctaggatcctcgctatggggaatcataactaagtctgcgatgcctagcagcactgctcaaacgagcccaattatgcgccaatggctcatcaaccatttgtattgctggtatagaagttccatgcctgattctgtggggctaccacgacgttccggcccgatatcttcttctcatggaaatgcgtatccacagccattttaatcggaacatttctgtgtcacctataataatttcaatacggacgtataatggacggtgttatgacatgtggtttacttaagacattgtgtgatgcagtgcggttcgtcagctccggacaggggtagtatgttttcaacaagagagcgcttaacgggcaggattaagaggtttgaaattctcctaccattcgcccgctcgtttccgggtttgcccctttccttggctctatctcgctgttttctcttggtatttgctccattcgcgtgtctaatccaaggtcacatatagttcgccactatgaggctatggctattcaggagcaagacgaaacccggtgtgccagagcacgttctgtaagatttcaagatataaaatgatataccgagctaataatgccgagatactccacagaaggtgcaattggaatgaaggtgctatctgatccttcgaacgctgacctggagtgagtttatcttctacttcaagagggagccccaaactagaggaaccaaggctcaaataagacactcaaactaaccaccactgaactagcgttgttttcgtccatggattgaccggcaaccgcgagagaacatgggctcacgaaaacggaaccttatggccccgagatcttcttccgaaagacttgcccaaggcacgggtcatgacattcggctacgatgtcgacatatttagttttacctcaataaccttctcggaccgactctatgactatagccaatccctagcctatgcaatagtcagccaacgaatcggctgctcaaacagaccgatcttattcgtcgcacacagtctaggcggcttggtatgccaacaaaccctgatcctcagcacctccatagacggtctatgggagatatcatcaagttccatcgggttaatcttcatgggcacgccacaatacgggtcttcgcttgcctcctatcgagagaaactcgcgagaggcatgaagatagtccataccgcgaacagggatatggtcggggctcttcatccggattcaaacaatgcgcagcgagttgggaacgagttccagtctatgctgcgtcgcggtgacctcgcccttaacatcttctgtttctacgaagcgaagaatatgaatggtacagtgggcaagatcgttgaagagaactcggctgttctgcgaggctatgagaattgtagtatcgatgctgatcattgcaacatgacgaagttcagtggtcatgcagatggtggttatgggcttgttcggtcgatcattacggggtggttgcatgagtctcgggattgtgatgctgcgaacaagactgccatgtccgcttctctctctgggaatcccgcttggttggggtcttggactccggggagtttttgcttcaatggaactgcaaactcgcaaggttttgcttacacgtatggcgagaactttgccttcgactgacggggtatctgcacgaaatatgaacgttccttgcattccttggttgtgatagtgttgtgtaagcattgtctctcaaacctcggaagtcaatagccattggcagggtttataatacaatgcctttgttcttgattgaacgacgtccatgcacgtttcaaaatagagttgggaattaagcttctaagaccaacctaaccctggagcacgtgcaaacttgaaaccttgaagtctcagaaccttggttcccaaaaccttggaagtttcagatatctgatgagtcagtgatatttcttccaaggttcccaaggtttctttatactagagcaacaacacacccctggaatactacctatatcattcatttccctaattgaatagtgtacccgcttgtagcagctcctggttccccaggaagcttgcggctgatcaaggtattgtttggggtatgttggctgacccttcgtgtagccattactgggttgacactcgcccggggcgtcggtgtaatacgccgagctcgggttggttccatggccccggaacgatactgacaactcgctgtatcatgtccacatccccggggcgtagtagactgtgattgggttccctgcgggggtcctggtgtggtggaattgggccgccttactcaagttgcatggctggtgtcgctaccgatctgaggaagatgtttcaggaccggtactttattaagcaggatactatcatatcagacggtagtcgatgaacatgaacgcggaggcgggtttgatggggcttccaatctgcaaagcgtatctcgtcacatacttttggccttgacatagtaaggcgatgatttggatcattgctctggatccaccaacttacagacgtgacgaaccttgttacctggttattccagatagaaaaggaaatcgggcaatccctgtatttatttatatttttgactctgtacttgctcttcgctgctgcacatagcctcaactgagtagcagtggactcgtatacggatggtcggttaggcaatgtacaatactgtttttctatagaaggctatgtacatcttgcactattattaaaatctatctaaatctgggggaaattcgcgtttcatctggtctatttccgtgtaaacgtctttggtacataggaagatcccatcccgggtagctgatcacagtcctttttgcaatagtccttattgtcagaatgaccttagtctggcctaggttttctctatagggttaaaattagaaccaagcatttttagtcacttcttacggcagtagactattccccagcgcttgagtttgattccagatttgcatctcgatatcactaaagacctaacatttctcaaaactatttgtttctgtaaagtctcatgtgcttaggttttgatagaagcgaaacgtaatcgctaaacaacagaatcgcacactccctaaattagcaatacctttttccgctttgcctaccaatgttgtacataaaagaaccaatcaaatccacgaagcacaaacaagcagctaacgacgcccgagacaaaggtaaacaaaagtaaatatgaaccgaaacaccatcatagtcatcatagtaatctcaccgactactaagcccagcctctcccttccggtggatcctccttacatggtctttcatattgtcgacacgactgaagacctttgcgcagccctcccactcacaaagaacaccagggttatgcttcgcctcatgacgagcacggtccttcttgctactaaagccatttctcgcagactggggacatccctcatagcgacagaagaggtacttgcggtgtctgttgaagtgcttcctcagatcacatcctcgattaaagagagcctgtgaggaacaccctgggtaagcgcaacgccaggtaccgtcacccgttgggatcccgtaattgcttaggtcgcctgagttggagccagatcccgagcctgaggccgagccttgtgcggccggtggagaatctggatcagagagggagtgtggtggtgatgaggagattgaggtggtcgtagcggtggattggtagagatgggttgttggcgctgggactgatcggggaactgagattgatcgggggactgaaaagaaggcttctgtgattggatcggaggaatggggtgggcaagaaagccactgctcgtttgcagtgtcgagttggttgttgaatgctgggtaggtctctggttgcacctccgccgatgggggaaagcgcatagagcctatatttgggaagggctgcgactggtaaaagtctatggctggttcgctctcaagggaccattggtcaatctgttggggagtatagcccgacgtgccagggccattcatagcgagttgtagatattcccggggatagtaaccttgaaaggacggcgttgtgtcgagtccgatggaggtctcagaggtgggtatatgaggagagattgggagaatgtctgcgttagatgcagtggaccacgtgtgttgagagccaattgtatcagtgtctattgattccctgctcccggtggaatactgccccggggctaggaaggaccgacggtttagttgtgcgttcatcgagtttatgttcatctgctgaagggcggacatgtgagagttggatggaataccggtagggatatcgtacaggcctccaatatattggggctctgaggactccgagtaaccagcactatcagacatagtgctgtacacactcttaggcttctggcgactagggtacatgacgacgttggcgatgctgggatgtagatggtattgtggaaaggtagttctgaggatggaaaagaggactcccagtcgaagtacccaaagctgtcgtttcagaaaacagctcttgcatatcagttgatgattagtgtaatttcgtccttataaaggatgtatgaataggtgtccatgcattgaagattgttgcccgataagatcgagaagccaaagtattatagagttttggcagatttagagctgaacttgtctttagactaagacgtaaccggcagtcgattatttatggtcatatcatgtcgaggaggcagtgctgtaatcttgaatttctaggcgctccgcagaagaagttgaaacgttgatcaactgccatgctcgatatagaacattaaattgttaatcataccggtcagttatggttggtaatctgtccaatgagcagttgatatccctcccttggtctgatggttgactcaagttgattcagaatggatggattaccgggggccgggtctactggcttccccttgagagatgatcttcgacccaatcagggcttgcaggtgttggcctctcacgtgtataagtattgtttctcatcagagtagggctgaaagatgacgacgtgggtctgcgcatagtactttcccaggttggctagaccaagaccggcaggttattgccagaggttagggtttcatgcattaagtatgatattcccagggcctgcattgtgtgttcgtattattggtcgttagaaagccacgagacgcccagggcgccgggtatgaccaggaacggtgttgcggtacttggtaagatcttttatgtctttttgtacatgtccgtgacaaacatgtggaactggtttatagccataagtatcaagagcctcactattatggccacattacacaagagatacccaaagttatacacataatccccgatgccatgttaataagttcagattccatccataattttaattccagtttctcaaggttgagtcagattggaggtaacggtaaaagccggaggtggcagctcttgcgtggcggggtatcttactagtagggagctgggactgatgtctggcaggcatatttcgctccagagctattctgtatagttgatcattacggaaaccaggtattgcagggggtagaaagtgagctcatattgagtctgggaatctggaattcaggttcagctccggtagtgccatagacccttagcactcactgacaccgacggctagcaccgttagtgcattgtgggttgaccgtgtccattctcatgattggccaaatgatgagaagtttgtgcttatcccattatttgaccactcacgtcgttcgatggggaccaaaatacgggggccgttcaaaacgaggagcggtgtccgctacaatatgatcggcgtgagcctcagtgtggcttcgggcctattatccagtcactgtgtgaatagtaactattacatttggacagattctccgggggttttctgggcatagcaaatgatggcctgaatacttctacaatggtacgtacgttgtaagctggttgtgagaggatatctttggtctaagaataatattccatggtagtgtgtctcacatccggaaaccaaaaaaaagaaaagaaaagaaaagcagcatcgacttcttaataggacggtctatcgtgtatctaaatcgtggcttaaactagacccccaaatcgtcagatcgccaagtctccccagggctaaggtgttgggtggtcagaattaccgcccccacaatgtctcaaagatccaaggtcagactgcactgcttctacaaaaatagagacatatctccaatgtctcaaatttggccccaaggtcaccaggttcgtctcatggatctctctgtgtgccttggatcagacccgatctctcacagcatcatcctgtccgaccaagaggggcgattgctcgcccggaccaggtgttctcttctggtcaggggtatctcggtataggacgtagtgttggatgcagaagatcgcatcgaagaagattgtaacgttgcccagcagtagcttgaccgggttgccggtgataccgctccagtcactttgaaggctggagtcaagtaccagttgaagcattgaaaggaccccgccagccaagtcaagaaggatggttccaatgctccatcctactgtagattggcgcttgtagttcagcgccacttgaggcatatattttacaatggtgatcaggagcttgatatacgaaaacaagtagatctggagggatttagccttgtcttgtagttcccccgtgattcagcatttcactgaagaagggcagcatgttttcacctaccacgtcaatccacgcccaagtagaaggatcataccctccgtccggactttgcgccaacacgatcgccgtaaccactagaggagccaaggcacatccccaaaagagccatgccattgtccagctaatcctttggaaacggggaacgtggaacccccagatgaaaggccaaaattgtgtgtacattacgatgcacaatgccaccgcgtgggccgcaaatgcgaaatcgttaaaccggacggtgggttcgatcgaggcagggtggcgggccgcatactgtgaccgaatgacgggcgagtagaggaaagcagaggtgtatatcgcatagcagacaaagcccagagggtttatagttgataaatcaatggataagccgacggtcgagttgcgtttccagttggtgatgggctgcggataaaaagaccccgaccagcagagcatgctatgcgctcgagtgagccattaatccaagtgtcatatgagatataacttcgggttcaaccgtaaacttactatgaccatcctaaaaagctggaaatcggtcagtcatgttcataaggcccggtggcattcgggtgcgaataggagttcactaaccgggacaaagctttaatgaatatctcgagttgagggctcatgttggattgaggacactcatcccaaagtatcaggcgggggaagaagagaaagtgcgcaggtgggaagcgacgatttgggctccattcgcacgcaatcttgtgataagatcagctgaggataagacagataagataacaaccacgggaacaggctagttgacttcaggaaggcggtcacaatagcaatgctgagtcagcggctggttggcccggtaatgggttgtcggaaaacaaatgactgggggaatcgctcagcctcttgttgtgattcctctctgcccgaagtgcctgtgcgacgtgcatttctctatttcataccaacagcgttgtcgggcgctttttcaatcctatcctaacctcacattccgaatctgtacgactctctttcctccctctccttacgctccgcctcgacatctactttacgaccctttcgaaccctacttagatcttgtaatacgaccaattttgccataaactggtcaacatacaatcaaccgggccaacttttattggacattccagttagaattccgatctcgttatcgcatggtgcattcttcagatcgggagatctcgaaagatctccggtaaatccgacattccagactgaatatcgcatggtcgttcgagtattacccgcaaaatgtcagactcggatctcgccgccgctgggagcagcacgtatgcatccaatacccttcatgttggcgatggcacctgggactccgggcgagataccttcctgctgcccaatttgatggggatcaactttgagacgatgcgatacaatggttagtccagaacatcagcaatttactttcgatattgttgcataccttttcaactttcttgtgaccactgacacgttacaggcatggggaaccgtttcaaggatatggccggatatcattccataatcatcgcacacggcgtcattgcaacaatcgttttcttgggtatcgtcccaacatcaatattcataatccgatactactcccgatggaatccttattgggcattcaaattacatgtttggtgtcaggtacttactttgctcttaaccacggtcgtgtttgtgcttgggtggtttgccgttgggcccgaaagaagcctaaccaacccccatcatggaattggcctagcaatctatgttttggtcatcttccaggtgctgtggggctggttcctgcacaagaaggagagtaagagacagcgactccacgtccctttgaaactagtggtaagtaacaccccaagaagggatatatgggctctcctaacatatcatagttgcaccggtggttgggtcgtgctcttgtacttctcggcattgctcaaattccactgggactcacgctctacggttcgccaaaggtccttttcatcctattcgcgctgacagctttcggatacttggttctttactttgtactttcttacaaatatgacgtcgaaggataccacatgggaagtgatctcggtggtcgcagccattatacaggtccttcagaaatttcagagcaccatggcaatcacacaggagcagctctcgccgcaggcgctgccggtgctggtttggcctcaatgtttcgacgacgtacaagcagtcgccacccgagccatgcttatgaagactcccgcacatccatttccgatgaaaagtattcggatgaatcctcccaccatcatggcggtggcggtggcggtggtggaggaggtggtggtggtttcggcaagaaactcctcgagattggcgcacttgctggggctgctctcatggccaagaagttctgggaccgccgaaagaagcgtgaagacgatgctgagtctggtcgctatagacctgcgcattcgcgcagtactagccacacggatgaatctctcagcagactggaagatggtcgaccggagccaacccaccacacgccccttaatcgaccaccgagccgtgtaccaagcaggtctcaaagtccaggctcgtcttactattacaacagcacgtatttcaccgagccgcccaagcgaaacgcttctcatggggttagagacgccgttctgggtgccggtgctttcgctgccgtgaagcgcctgttcagccgcggtaaaaaggacgatgaagagaaacggcggctggaggatatcaagcgccgagaatatgaggacgaggcgctgcagagagcaaacagcagacggcgtccacaggctggagaaagtttttacccacgaagaagggccagttcgtacagtgaaactgatcttactgaaacggatttgtctcgtcctccacctcgacatgcatcacatggacatggaggatctcctcttactgcagagcctctcgcctccggtgctgtccatagtgctgtatcagatatgccgcctatgcccccgagccaccagcagttctctggcgacttgagacccgaagctcctccctcacgtcactccctcgcccatgatggagctgaatttgcatcaggtgcggccgctggcgcagcactagacgcagcctcccgccgcaatcggagcagcagccggcgccgagaggacgacgttgcctctccaccggtatccgtgaaagtcaaaatgcacaatgacggacgacatgtgacactccgtcgactgaccgaagaagaagcggccgcgagccgcgaggcccgtcgcagagagcgaagaaactctcgacgtcgcaacagcagtgcgggttctttgtctggcaatgaagacgctggttatgaccgatggcgtcgcgttgaagagctcgaacgtcaacaagacgagcaaatgcgacgtgagcaggcggcagctgctgctcgccttgccccgccacaggcatccatggctccttcaggcagcattccggcgtcctcatggggcgctccgccttctcaagtcagccaaatgccgccaccacctccaattcctgcgccttctaccatcccatacggggcaggcagtatcacttcgcccgcatataccggtactgagatgagcggttcgtacgcgaacaaccgtcgccgcagacgtgctgaacgagcccggactcggcaagaaaggcagcagcagcacggcgtggaattcacctgagcgctctcttagtatctagcattctccgttttccctttctcttgtgtccactacaggcccagcttacgacatgtacaaaacgagttatgtgcttctccagccgtgttgatataaatgatctccccccctgtcacggtgctatgtctttttgaaatgttcccctttttcttgaatgtgcttttgaggcgacgaaatgattctcttagctagcttttcctttcttatctcttcttccatgatgccagcgatttaacggatcttttattgggttgtcgattgacttttttttttctggtcttcttgtctttatctttgtgacaacgtacctatctgggtattggttatccatattcttttgctaccgcttgggcctttacagccgagcagaaatgcaagttagaaactctggaattcgatgaatcttgaacaatatatcaaactgggatatggcccctctaggccctaaacaagaaccttggattttgttgtctagtggaataatgtcgtttttcctttccgtcgccctactctgtggaagtagacttccttacagaatcaccatctggatattgagtatagtgatcgagcaatgaatccgagccctacagaatgtgtcttggtacacttgccccttgctgtcatatctggcttatggtaatttatatttctcccaccgcttagcgcacgactcatgtcaccttagcgaccagtagaaaggtatatatgatttggctctgcgtagcctccgtgttttgctaccgtgactctgtaaatcccaaaagtagatacaaaaggggcttcgaatttgtaataacacctcattgtctgaggctccctctgttactatctgtgtagaactactaatctaggccgactaccacatatcacacccccaatatcataccaagaccaagcggctcggctccacaatgaaagccctaatcgggcagaaatgaaagacaacaaaataaaacttcttttcaaggctccatggcttttttcggggcttctcacaacccaaaaactttctgcatcccaagacctatatcgtctttcgtcactgggtcttctgtggcgaaataaggaaacccgtcaacaagagcaaaaatgtaacgacggctgcatgattcgaacatgcgcccgcgaacggaattgataggggaatcttgatttcaagaatgacttcaagatggttctagtcaatcgccttagaccactcggccaaaccgccatttgatggaggaattgtgcaggaatcgacatcaagaaggtgtactttttgaggtcaaacgtcaagcacaaaatttaacattaggagggacgttatatgtaagaagactccctgggatgtgaatttagtgtcgaatttggtgtggaattcactgtttataccgcgcgttaatccctgttgcatattggccaaacaagatagtaattattcgaaaggtctgagtctgacaacgtcggattctatcgagctgtaaaggttctcgcaacgatctagatactaccccgcacgcacggtgaggaggaagagaaggagaggagagagagctatcaaactgggtagcttctatcacttggtgatgcctcaggcgtccaacatccccaacgatccatcgaagctgagggtacacgagaattaccctcaaacttataggcctgtactggtctatgagaatgaatccgaatggccgggtcctggggttccttctttggggaggtttgcaatatcgaaatccgtcagaaccaccctccccgggctgtcaggtatgatgagtatgttcttgggataaagcccattgcgtacgactacagcgctctttcgggcaatgtaacttacggtcttggaatttgccattaaatgcgattaattcatactcatgactcgactttcagccacgaaaatatatcgaatagaacaagactaagcacgtttgcgggacacaaggagataccagtagcataatgatgcatacaaatagtctttgggagaaagtaggaacggaattcgccgatgtgcatgtcgccccgatcttgtccaatctcaattgctcaccaccgtaagggtgtagctactcagcccgaatggccggtgtctggataccactggcatccgcaagacaccccgaatttggacaacaaaagaatgataatgtccatcagtagatacagtaaagctctgaccaggtagagcattacagcgccgactcgggtgttggtcaatgggtatgttgcaatgaagaagacattgagagggaccagcacaacgagcgcagggacgatgaagcaggtgtggaatagcaagtcattaatgatcgggtggcaagtgatgttgtcgaatttggtagggaaatgcggagaaggttgttgagggagatcagttcgagttattcgaaatttaaaagcatactttggggctttctcactggatgaattgggcgcaggtcggatgctgtaaagcgaaaaggaaacagcaaaaaaagcagggaggttcttctccgttttacccgcaattgtcgagtcatttgcaacaggcgtgtgaaccacgttgctggctctcacttcccgggcatcagcacccgaggcaacacgagtggggaacgccgtttgacgcgtttcacgatcagacaagctgaaaagggacgagtttcgcatatcatggttctttgggatgcgagctgacagagactgcgttcttttcgtagggctgttgcatggtgagctctttcgagagtacgtgcgaccagcgaccttccatttccggcattgtttcttctgtcgatgcgaagcaacgtaatcctgtcttttttcgatcgaaggtaggggactacgtgccgcacgagaaggcggagacagagaggccgcaggaggagaaaatcgaacgcaccgcatcagtgaacctggattgctagagttcttgaagttaccggcatttgtgcctggccgatgattcgccagggcagtgatgggaggtttgatccactgtcggcggccaacggaaaggcgtcgcaactttgagggtttctgagattcgctttcatcgccttgacaagcaaagcttgcctctggcgaatcttggaagcaatcgaaattgaactcctccgcctcgggggtattactcctccgtaggttctccatttgatagcgacgaaatgactcagtagattcctctgtgcttcctcgttcgctatttgatgcgggcgtgttttggggattcaggggttcagcaaggccgtcaagagtgtggtacttatccacggcgacatccaactcaagtcgagaacagtttcggctggaatcgaaaccacggaatgactcgcgaagttcaaggattcggtgagcttgctttgggctcgcttctgcttctgtttggcttcctggctgtcgtttgtcagttccgtcaaaccgggtgaatggcgcaaacccagtgaatggctcaaagagaggtgaacagaagccatccgtaggtgagtccgtcatcgtcagtcgagtatccacggtgccaagggggtctgatttgagtgatttggcgaatgccatgactgcacggtcagctgaggatgaaagtcgatggtcgttggagatgagacgggcaagtcaggtgcttgcttaacttccaagcttggaaggtgcgctcccaccctaccgcataggactatacctaggtagacacaaaaaataatataataagcaagtatgattagagggaaatggagaattgctataattctacaggttcatagttagggcgataatggttatgtacatcaagtctatttgacgtgggcctgcagggtctcgagaacctgttcaagaaaagtcagtatttaaccagtccagtagtccccaagagttcatacctcaagctcaatcttggcctcagcgatatcctgctcgctgccgctgccgctggcaatcttctgggcctcggcgatctgggcgcggatggactaggaaggaagttccggttagcttaagtcgcaacgttgcaaaggaaaataacctacatcggcgctgaactcctcaagagggaagccctcgacagcgttgatgctgagctgggagtcgggctggacaacggcgaagccaccggacactatacaggaacaccattgttagttgatcaatcccaattgagaagaatccagatttgcggaatgtctcaggacgcgagggtcggacgtacggaagtactgcttggtggcgccgctctcctcgaggatctcgacgagaccgggcttgagctgctcgatggagggaacgtggttggcgaggacacccatctcaccggaggcggcgggaatgttgacctgggtactgtgatcgcggaggttcgtcagtatttacggaaagggcgtaggcaccgtcgacacgggtgcaagtggaagcataacatacacgccagtcgagcggtagatggtctgtcaatcaattatcaagtcagtacttaggttacgatgttgggatgccggccggagttcgttcacgcacctggtgaggcagagtcagggacagcttgatcttgtcggcgacggcctcagcgtaaccacggcgctgaacgggagcaccgaggaaagaagggcgagcccggagggcggagcgagcgaagcggaaggagctcattttgcagtggtggatgacgtgcaaaggctggattatccctcttgaagttgcgttgcaaaggtcgaagtcggaatgccggttgttccctagcgtctggtcacgtgctacgggaattcaacggccggactatggccagtatgagcgttgttactacggtcatgctacgcatgttttatgagaacacgaggagaaaacaaattattccaattaatgctctacatatttcattatccgtccattttggagtctaggtccctgcgggaagttcgattccaaactgtaatgccgagaacaagttgatcgggaaggacccgctggtaatcagacgcagcgggttgtatatgtctatcggacttgctgttttatgtggcctccgaaataaagtcttcttcatacccggacagctgtactttactcggagatgcaaagtatatccatcacgtgatgcatataaatcagggtcacgtgtaggcgagtggcagaacaaggtgagaaaaagtcgtagactgaagaaccgccaaagcaagctaaaaaaggcacaaattttcatttatctagaccgatctaataaaatgcaataaggatacgatactatatcaagctactatgacgttgcttaggacaatcttgcagttagcaagctatgtagtgatgcgttagtatgtacaccgcccgataagcgagatcccacaaacggaacgagccctagccgaccctcctaggcctgacgtccctattcccactcctctctatccatcacaccgtcaatcagcgacaacatccgacaagatggccagtacgtttttaccacgaccctatgaccttgcctcttttgcaagctgtgaggcagggaaaaaaaaaggccatggcgctgacatgattttcacccacagagtccaagaacgcgtcccagcaccacaacagccagaaggctcaccgtaacgggtacgtctacccttgaacttcctcgattatcctactgttacactttcccgacctttttcaatcgattcaatggacatggtggaaaagctagtgtgcgaatcgttttatccggggtgatgattttgaggttacgacttgaatattcgctcgggcaatctcttcgaactactgcattcgaccaccatacatcacgccatcccaaccaggaccgaatcgctgatatatcttctcaaacagtatcaagaagcccaagaccaaccgttacccctccctcaagggtgttgaccccaagttccgccgcaaccaccgtcacgctctccacggcaccatgaaggcccttgtacgttgaccacaacccgaacccaacatccaccacccatgtcacggaatactgacccattgaacagaaggagcgcaaggagggcaagcgtgaggtcgcatagattatgaactcagtcttaaaaaaatgggaaacatgaaatgcaactcgagcgtgcaagaggtccagagaacataacgtgtgcgatgatcaaggacggtccgctgtgtcgaataggcctggtttttgcttattccttgcgcgacgagcctcgagttgtttgatatcgataaatcaacgggcttaattcgatgtgcacagcggtgcccttttcccaagcggatcaattctgctgtttccttttatttctccttccagactcgagggctcgacttcgtctgtgttgcgacccttgagcttagtctctccccgttttcccccaagtccccgtccggcatatgtgtgtacagctgcgtgctttttctcatgcgcgattgctgaaggatttttcttaacgtgccaagaataacccccaagttcccgattgctatatatcctgtcttgattcttctcgatcgtgacagggttcatggtcaggggggctacatcccgtaagcagtaacagtttctatacttagacatattcgaatcaatttattcagtctagatcccatcaatgaactgtcaaaatctagacagcgttagaaagccaaatcaccaatacattggtgcggagaacttcaccgttcatagttgagcgcaggaacacaacggccgataggatatacagcttgatctagcctggacctcgaggattcggcttgtgtgcctctatgatggctgcgtatgtttcaatgggctcctctatattttcaacctccttcaaggtagggtcttcctttaccttattcatatggaagtaaaggatcctgccctgcatagttcaaaattgtgacattgcggttgaaggattgcgataaaaggacaacaattggttcttaattggcacacagctccaaaaaggcgcgatgataatgccccggaatgttttgtaagaatgtaggccaccgaagggcttttataaagtaaccagtgtctggaagatgcgcatcttgtatagtgcggagtagccttttaccatggggacgtatagagccccaatttcttttagtagcccgaaatacgatatttaaatcttcgtgactgggccctcggaaatataatttcgcgactaagcagcaagctcgccaattacggagtagaagaatgaaaacagaaacagcccgaatttaattgggagatagaaaatggtgaaattctaggaagtggtgaaatactgaggcccaccaactacaggtagtgtgttcgtgggcttggcacgatcattggttatcttgccccgtgttatcatccggttcatcttgacgtcgcttcgcatctgcttcttcctggcgtctcctgtggtctcggattatctccgctaccggcacatatccctcctccccgcgctcgatacgccgaccatcattataaaaaggcggatccgtcaaatcagaaaagaagggcaatggccctttgtcgatgctcctcatgcgtgcgtactgttcagccaccctcccgtccacccgctcatcccttcgcataatataaaccttccccttccgagtaatctgatggattggccgctccgtggaaaaactctccgatatctcggtccgaacttgctcatcgcactcatcaaggaagagatcgtaacaaatgtatataagatcgcggagaccaagcatctgaatcatatttatttatatactaaagccggtcgtttgttgtccaacttctcggagtacagcgttgctcagtccctcaacacgcgattgtgcccaggagatgacatctgcagaccgtcgggactcatgacggtatttatcccggagtagacaccgtaaggtgaggtccgtctgcaatgccgtgcgagtctgggcagaaacttgagcctctatgtcagacatagcagcgacagtgtgaccgtggctggtcgatcgatgaaagagagagatatatggttgaggtagatgaagcgcctgctagaagatatctccaccttaccggtcggcgcctcgtaggtcacgtgtagaacctggccagggagtaattccggctgacacccagcactagatataaaaggtaggccgtaggccaaaaaaaaagccggctgcaggccagagaggcagcctacaggccatcttagctcagatccggcccggatttgcttccgctacgctcagcaaattatcacctatacacctccaccaccggtgggcgcttataggtcgctggtagactcctatagattaagagcccgcttttttatagagtaaagagtgaaaccgaagataaaaatagagattctaatatatgtctaggtctaaaagacgtacttttataagcctaattcacttccacgtcggtgataacagatattgagattggttacagaggtcataccttccaaacaatcaatcttttatcgaacccgccactgataacccattcctccctgatcgggtcaccctcttcctgaggtacagcaacatatcccgaccaaacagttctcaccttagagccgggttcgtgaccacccttcaatgtagcaatgatcttccccgtcttcgtctcgatgccacgaaccacaccatcatctccattaacccagaccccagacccattaggcctccatgccacctgcggtgtggagtaagcagtttgcggcgcgaaggtgtttgcctgtacgaggatagcagcatcctcgcggttctgtatttccagtgttgccagtgcttgagatgcctgtgtcactgggtcctctgaagcgggcgctgtcttcattgcggggaatagcagacgtacgatgatcactttcatatggggcaatgtcgaggtcgccacggccaagaggccagggtcgtgtggactgagcgccatatgggccggcgagaaggcaacccaggcattggaatggggggccagattctgctgtccaaggagacgagcttctcctggggagttcttagcatcggctccatcattttcacgagtatccgttccttccgatgctgcttctacctggtagtagtagatataggtcgagtctctgcgcgagacgaggaggagcggctcgttgctgtccacatgtgggacgaacagcagtgactccgggtttgaaacgagtttaatgcgtgcaacaggctcaccaatcttgagagctggtgcgtctgcttcgtcggggatattgaggcaatatactaaaacacactcgtcccaccctgcggtggcaacccaccacttggaaggatcagccttgtcttcgtaggctaccaccttcactgcatactttgcatgatccttcctgttatccagcgtttgagatccatgctgtaggagcagctggccggacatgttggtcatgaggatgtaccggccctgcaggatcgagataaatgatagaactggtgaatcagagagacccgagaatgacttgatgaccgcattgccttctgctgactgcagtaaatggacttgtctatctgcacccgtggagacgatataagactgcgctgatgcagcgtctgcggcggcttcatcggcatcgccgcagggttcctgccattgctctaccgacgcagcaagaatattggatgacgtcggtgtctggatgagagcaggtcttgatggtgctagggatacgtcagataactaacaaaagcaatcccagataaagcttgacatgtaaagccgagtcacgatgacctttgactcccgtgccaaaataaaactcacctggctcgctccataaagaggactgctgatgatcctcgccatatctttcaaaattcacggtttggtcataggtgttcttctcttcgagcaggctttggatggtccagttgttggtgtcatcgccagaggtctgccccacgtcgggagcaagctcagcttcgcggagaaaagcctttaatgtctcggaataattattgctgcgcaagaaccgagcaactatagcacttgatagcgcatctactgttttggagggagccatgcttgcatccgatgtctggaagaaattttggttggggagaggttagtcgcggcacacatgcttgtatatcttcctaactacgactcctgatgaatatgtctgctctacatcttctgtccagttattaatcggagattacagaaaaacgcggcttttccaccttcagcagagtagagtatgtatcattatgaatttttatcagacaattgatttccccatcccattcgcgaaacgccggatatccatcatgcccccgtgaagtcctcttacaaatcaagcagatgcacgagttctcagcctatcacttagtcaatttagctgaacatatcctcagcccgacgacggcgacctccgcgtccctccagagtatcggaaaacaattcctttccagcgttcgtattggggtgactgtcgtatttggacgggaacagctcgcgtaccgatgcacctctgcctttaatcgacaacccttttgacgagccgccccggatggcaaatccttgatcctcggctgtggcagctccacggatgcgggcgccattgttggcggaatcagggaagagctcaatattgctgtggcgtctgtgttcagaggcgcctggtagagaagaagcgtcgaatgcgtctgaccggcgatggtggctagacttgctaggcagcgactccttcttgatgtagctggatgtaggtttgtttgggaaaagctcgcgggttgctggctcgctctcgcctgcgcccgcgcttgggaaaagctctttatccttgttcttgcgaatgtatcgaggcgatctctcacggaaccgcctgctattatcacggccacctcggtctcggagttcttcctctagcgtgtctcgtcccggagatgcactgcgatttcggagacgtccacttgatcggctatcgtcctctgggaacaggtctctctggccacgacctctgggctttccccgagcgcgctcgggttcagagccaacgttatcaccatacatgtcggcgttgaagtggccatcttcgtcgcggtctcggcggcgtcggtgctcccggtcgtcgaatctgcgccgcctgtaatcgccatcccctgtatcgtcgctacgcctcctgtccgcaaactcttgtcgcaggcgttctctgggatcgtgctccgggtgcatgagatagaagcgactcttctcatgggcgcgtgcttgcttgcggtccgacttgacagccgatcgcacttggaggacggaatcagggtgggaggagagaattttcgccaatcggagacgcagcggtggcaaggtagtcgcgtcttcttcctcggcgacttgggtgagagctgtgagagcttggaggccaatttcggcgtcggggaagatgatgttggcggatgtgtcgtcgatccattcaatgcgcactggttcctgcccagagcattctcgagcaaattgtttgatattttcggtggtcaattcatcgacgccgcgaatatgcactttttcatagaccgcttcatcggtgagggggtcgacggtggcttctacgttggacgttgtttcctagcactcgacacatgtcagtcgaatcgattacgacttcaaagactaaaaaaacacccaccacctgaattggctcgtgctcgagctctggctctggtcctaggtcaaggtccatgtcgatgtccatgtccgcagtaggagctgaggcagccccgctgaatgccatgatttggggttcgctggatgaatcggaggccccaaacggatctcaactaacagtttgaacggaagttcaaatggaattgacaaatgaggggatagaactgagcaatgcaaggtgaaaaccgtgcccgctggtagcttgtctctctgtcctaataaggaatagcgtcctttttccggggtacatcagtcatccgacaatatctccagggctggacaacttgggaatctcccatagacggtccacgggtccaaacagctattattattgaattctgagcctaacgacaaatttcgaagaactaaaggctgcttgcttttataattgacgggtgtttaaacaaagaagaagcggtggaggtcatgaatagtaacatcgtgtcttggacaacaaagtatgtctcgcaagtgccgtgtaggcttacaataggcaccagaaaagcccaattgaggacaaaggggagtcaattttgaccatggcaatacttaaaaggattgaggaagctgatagacaatcctaagcccgtcatctactgcctagtttcgctcttccagatcctcgtccatagtatccatcagacagagactacttttcctaagcttcttccttatagctcaaattaaattatccgagctatgtaggaattaaactatactctcttttctttatctacttttgtatctacgttcttcaaccggcctaatcggataccgacaccaccttggtcctctgcctccccactcgaatcagacttacataggcagtatgtaaagacgttagctaatggtatggctttgttatgtttgtttgggttgtctatttagcggacttttggacgtgcgctttggtattccttagatgcatttttcttaacagattttcttctcttcataagtgctatagctacaaggatagaagaattagctatcacaacctgcatatcatgtactttcatatccatgggtgccaggaataggtcaggactagtagttttatcaagcaattttgtcaagccatatgaaaataacaacactcatgcccgggtatgttactaattttctgcagggcaaaaagccgaatgtcgcagtggtccctaaaaactggtgcagcggaaacatgaaagtgaagttggaactgtatgctctattgtgtattttaaggtcttatgaaggacatttcacgtccacggtactatttgcaatgtaagagctttaaagcttacctattgttactaggaatcccatccctcctagatagattttaccctgcgaccttaccaggtcgtagtgttactcgaaaactggtaagaagtaagactataataaaccgctaacatactggtaattacttcttaaattctagaaaataccaaatccatttaccctgcgagctttaccctgcgaccctgcgagcatgtcattcgtaaatagacgagaggacggatatttgatctagatacacgatgagtgtggtatgcgtgaggttttttttttacctcagtcggcctgaccgtatgtgtccacgacctaagggccagaacacatataaaattcataaggtatattttctatctacccacggctgtatagtcccaatgagcatccccattcgcataactagatacccttggacaagacaaaccacagccaagggtggtatactgtttcatcatcgaccgggtccaaaacagttggcaggtatctcgtattccattcttcatccaagtcatcaccaaaatattccggattcggcctgacgcgacgcgccttgcaatactcccagtaagcaggataccaccctgcctggccccaatcaatgatggcagctactactggattcgtcccgggcgataagaggatatttgagggcacaaggtcatcatgcgtgaaaaccacgggcaccttcccatcaatctcgatatcgcagccatcctgaaatttctggacggcgtctgcaccatagaatgggccagccaagtcccggtgaccggaaaggaagatgtcatttagaggttgattatctaggccacctaaagggtgctttagcatagttctggctagctaccgcaatgaattcagaccacttacccacgtaaaggacttggtcgggcagttctaacgatctccaggccttgaccataccgttgagctctttacagacagcctctctctcctcatcgttcaaagcaccccatctttgctccaagggttcgccccctatcaaggacatgtagataaatacctggccaccatcttcggtccacccaaacacctcggggactggcactttgcctttcaactgtttgtataccatattttgggtctctgcctctgtaacggtcgcgtcggctccatatttgacaatcaggcccaacgatggaaacttgacaggcgggggtcggttgaaccttgtaccacggatgttgcctgactcctcgttgatagctctcacctcggccaggatagggagcgtggacgcccggtgctccctgaaaaagctagagtcggaaatggtccttgttgtgttgtggcttgaatagtggaggcctgcctcgccttcaaccccctcgggcgtcatcttcgagatacacaggtgaagcaggggcctcggcggttatagaaagacccagtcttcatacgctcggacacgtctccagcaatcacgagtcgagctttgccaactaaagctaatgtcagtggtccattctcttagacgttggtgggagctaactcaccatgatcggcagcatgggcgctaactagattaagatgttcctcgccgtcctcaattagaacaggaaagaaccgacaatatgtcaattgaaagtgactatagttcgaattgaaatatcccagctgtgatatgaattgtatgaggaaaaggcataaacagtgtcaaacagcatccgaataaaagcaccaatcttgctttggtacgagtcttgattcttgcattagaaccccgaattattaacgttgaagccacaaattccaggttaattgctggatcaactgggctttgaaaataaaagtggttgacccaacatgacaggacagtttttatttatttatttttgagtgagattgtctatagaagatcattgtgcgaaccaatatgatgtatgatgtatttctagatgatctaaatttcctttttcggaagacacggacttgtgcccttggtctatctagaaggtcggctttaggctaaactagtgacgggtaccctataatcttggggcgtttaaagatgcgcatctccacctcagtacctccgagacatcttggaagttctctcgacaaatgagtgttgttcctggtacttcatgcagtggatctcccataatggccatgtcacagcatcaggatttaggattgcatggtgaggggtaccatgcgttccctcaatacttaatgtccgactcgttgaactagaccgctcatctgtctagcacagatcgccttttcttcccatcaaaaatcagcagattaaccaccgctaacaatcttgggtaccaaaatgctctacgccgaagatgacaagctcgtcttccgtttcgacgaccacatcctctgggtgcagccatggggggagaatgccttccgggtgcgcgcaactaaacaggcgtccattccaacggaagattgggccctcccctccaagccatccagcccaagcccaagcatcgagatatccgccgaccaagaagcgacaatcaccaacggcaaaatcaaagcaactgtgtcacgccgaggcaagatcatcatctacgattcgaagggaaataaactccttgaggagtatgcccgccatcgccaggacccgatggaccccaagtgcagcgcgttgactgtcgaagctcgcgagctgcgtccgatcctaggcggcgactaccacctcaccatgagattcgagtctctcgatcataaagagaagatattcggtatgggacaatatcagcagccctacctgaaccttaaaggcgcagaccttgagctggcgcaccgcaactcacaggccagtgttccttttgcggtttcgtcgctcggctacggcttcctctggaataaccctggcatcggacgggcggttctgggaacaaatgtcatgagcttcgaagcatactcgaccaaggcattggactactgggttgtggcgggtgatacccccgcggaaattgaagaagcctatgccaaagtgacaggttatgtccctatgatgccagaatatggtcttggtttctggcagtgcaaactccgctatacgaaccaggaacagttgctcaatattgcgcgcgaatatcggcgtcgcgaggttcctctggatttgatcgtcattgacttcttccattggaagcaccaaggagaatggagctttgatccggagttctggcctgatccaggtgagttatcattgttctctattttatatcgtttcgatggcaagacccactgacagacaatgtccgattatagaggctatggtcaaggaacttaaagagctcaaagtcgagctcatggtttccatctggcctaccgttgaaaacgcatccgagaacttcccagagatgctcgaacaagggcttctcatccggcacgaccgcggcatgcgcgtagcaatgcaatgcgatggcgacatcacacacttcgacgcaacgaacccggcagctcgaaagttcatctggagcaaagccaagcagaactactacgacataggaatcaaaacattctggctcgacgaagccgagcccgagtactcgatctacgatttcgacatctaccgctaccacgcaggcagcaatctgcagatcggaaacacatacccgaaagagtacgcacggggcttctacgaaggcatgactgcagagggtcagacgaatatagtcaacctcctgcggtgcgcgtgggctggcagccagaagtacggagcgctcgtgtggagcggcgacatcgcgtcgtcgtggagctcattccgcaaccaactcgccgcaggcctgaacatgggactagctgggatcccctggtggacgacagatatcggcggcttccacggaggcaacccagatgaccctctgttccgcgagctgttcacgagatggttccagtggggaacattctgtccggttatgcggctgcatggtgaccgtgagccgaaaccggagggacagccgacggctagcggggcggataatgagatctggtcatacggagatgaggtctatgaaatctgtaaacggtatattgggattcgtgagaagcttcgtgagtacacgcggggattgatgcgggaggctcatgagaaggggacccctgtgatgaggactttgttttatgaattcccgtcggatgagcgggcttgggaggttgagactcagtatatgtttgggtcgaagtacttggttgtgcctgtgttggagccaggtcaacgcacggtcaaggtctatctgccggctggggcatcgtggaagctctgggacgagaaagatgttttgcatgagggcggtcgcaatgttgagatcgaatgtccgattgagaatatgcctgtcttttgccgccagtagatggcggactttggatggagactcagcaagccatatctcgtccacacgataccttccctgctacgctgcctctagaaagtaccgctctgtacctccgtaggcctgagctttcccatccaacttagccaagcaacagttctccacacaccgtgaccaaggtaccatgtctccttccaagtctgtactagatatcaaacatcctatattccttctagtcaatattggaaaccgccgttgccaagcattatcctagcaaactatatatctaacaaagttaaatcaaaccttagctgtattaggaaggactacagcaaccttcaaaggaataataccaatttgtcgcgacaagaaggcacgggttacatgtatccatatacaagcacgtactaactactctgtatgttgtagatgtcaaaacacctggtattccttctagccaagccgccgttgccaagagagtgtctcaacagactttatatccaatcaagacaaatcaaacccctgaaccctattagaaaggaccacgtcaacgataataatattccgcgagaaaaatccccctcgctgatacttattgagggaaattactgctggtgatcctgctgtgtaacaaaatgggtaagggggtcctttctctctctgtctttgattgattcccggttggccgggcgtaggcacgtcctagttccttattactctgtgttaacgtcgagtcagatttgcaatttggctgtgctgaacacgggaaattcgacacccatggactaggcgctattgtgtatggttatgcacaggcacggagtattatggtttgacttggattattgttctaattctatacctcgtaattgttttgattatgaagtacctaggtaatcatcattaagaggtccacgggtgtttggtacttaataatcataaactggaatagccctgttgataccgctcaatcatatgtgatagtatactaatccacaagtcgcgactctcttgtctttagtctttacagtccgtataaagggaaagtgcacgctcacaaagtgtcggatattgcctatccttgccaaacaaggctaaaccacctatccaacgatcacatttacgcaaagatcgactggctgaagtcgactaacttccccacttatgtttgcttttgccttcgcttctcgtactccagggactcggcacccccgcaagccggtggctgacgatggtagccgctgagctgggtagtctgttcgaacattcccttttgcgtgccttcaataagcggtatagctatatgctgtgcttacactgccagctccatatgtaccgccgaacatagcctatgcttagaatagatttcccgtttatagtcagatatatatctactctgtgctcacgtgtcctgtagaattcaagttctcctaacaaaactagcgagacagcttattttttatatctgcgaactggcttcacaaagaatctcaaggatgatcggttaccctgccaaatttggttgtgaacgggggaacccatagggctttggtgccgtgttgaagtgttgaggtccgatatttttgctccttttactactcgtccacagtggacatccatgctttgcttaataaacagtcagatgacgcccgtgacctacctaggtacctacctacctatatgtacatatatactcagtgaacctgaccagtatatgtccagcaacgtcgaaccgagcggggaaccatgtctagaggcatggatacaatgcccaaagagggtttgaaatagccgctgattgggtaaaggtggcgtatctgcgacggaaataaaagaggctcaagagctcaaggtctcggctataaaaaggcattaaaggctcgtcagccttttgcctatcaagtctgaaaataattgaagctcgtgacttgtttcaatactccataccgatcaatcgtcaacttcgaagatccagtgattcaaccttcagcctaaacttctaccgcaagatgcctaccagtatcgtgaagtgtaagaactgcggcgccgatgtttcggaaacccaaagcgaatgccccatatacttcaaaccccctcactaggccaagtatgtctcaatcattaacctaaaaggaatctcaactgacagcccgtccaggcgaccctcgccatcgtcgtaaggcctagcatccgatgcaaggtgaagggacgatacggccttgtgacgatataggactaagaagcgctctgtttctgagttggattgaggggaaggctctgttactgctccacaagtgcttaactcatacatgtattgacagagactaatccaaaatttattcctaaatcacacccaatataattttcttcagatagctactcaggaagcctccataaattgcagcaactctgctgaatcatcatattcaccatccagcgctattgacgggcctcgtctttcgtagaaaggccactcaaagtgttcaggaaagtatccagcgtattcccagtcgataatagcctggattttcaatgttcgaggatcgacaatgatattatgctgggcaagatcattgtggcagaagacaaattcgccatctttggacactttctgtggccattcatttttgtccgagagccgcattacccgatatggtgggagcactatccccgaagggccaccaatagtgttcgatgtgatcccacgtagggtggataggtgttgatcaacttcagtacggacgatgcgtttttgatcttccgacaaacttgacatagacacgccgtcgacgtgctctgtgattaatatgaacgagtcgtcgacctcgaaagcaccgtacagaattggaacagggatgttactgatgcgtcgaatgaaacgcaacgctgcggccttattttgaagtctttctttccctagtcgggggatatgcttggtgcctcgaatggtggtcttatattcgctcggccgaaggcctcgtttgatgaaaaatctaccacaatggtagtaagctctttcggcggtcatcgcagtagacgtagcaagcgaatcagctcctaaataatcctcgatgtttctcggtgcgctaggattgagggtttctatcgactgttcgaaatcatggcaaactttgctacatcggtcaactggaccacgcaggagctccaacatcgacggctctacatcaacgacctgtttcaaagcgtccaaagttttcgcaaggtcttggagctcgtcttgaagccttccaagggatttgtcatgacttccatagcttgaaacagcatcgtatagtgattttgttgattgaagtacagtgctcacgatagccaatgctaaggcagcagtagttaagggatccgccattaagaaagtctgctgccgatgcttctttcttaatgctgctagttatgggagagaaatgaaacgttccctcgccgaacaaagggcgggcagatgggcagggcggtaaaagcggccagtaagggcgctaaacctgaatcggaggcaaggagccgggcgccatgcctaaacaggaagggggaatgcggaacgcggcaggcggtcggaggcggcagagcagcggcggaaacggcgccccgctcaccgtgtcaactaatactataggacatacatatacttgcgtggctaaacattatacaattatagaatttcatgtgactcaagtgcttattagtaagcgacccatgggcccattaagtgccacagggctacagtcaacggcccgcccataggcaggggagaagtaagggaagtaactcggtgcgaatcatgggcctcatggcccgtggcgaggtctatcaatgtctcaccgacgtagtacggagattttcatgccatttcacccacatggataaatgtatcaatcactatagattctatttcgtaagcgaaaatttctagtcccattctgatcactcggtgaagttggcatacagcctcaatccgatagggatagtagatctactggttcgactatgaccaagcaatacgcccaagacccacgtgtagaagcatgtgatgaggtgccgaacgattggcttgggtaaaattagccatgccgtaagaccacaacccctgatattatatactcattattagaatagggtagccaaatgaattaacatgaacattgctggcattcgaatttcaatcaatctttttgagttcggtgagtgtatcatggtgttggttttggagggggagggttttctgggagagctgtacataacattgatttttgctgattgaattagcaagttatcgaaaaaaaatatgcagggataaaacttaatgggatgctgatgggctgggacgactgaaacaaagaagagattccgatcggacgtccggatccggaaaaagtatgtattgttgcgtcattgccttgtgccttgttttctttcttggatgttgaaaacaaacccgattgggtagggtcccggcgctttgtttcatgttaaagatagaaatgacaaggacgttggcttggttaatgtcatttccttgttagggtgacgtcactgctactagatataaagtacgtgtttactataggtaggtgtcttatggagtagtgaagtaaagtgaagtggtatttgttggtaaatttggtcttgtattaatcctccatgcatgtttccatgccatatgtaacagacttcctttatatacatcagaaataaccataagagtatttgaaatgccaatgccatgttcaagaacacagttaaaatcaagtgttgctatgtgcccgaaactcctcgctcgcttttcagaaacaaaaaaaaaagaaaaagaagatgcgtttgtaaaagtcaaagtcaaagatggacaaaagaaatgaagatcgatcaggatcccagatggtagggcccaatgtggaacgttgaaaaattcaaagagaacggcctcggataagatggcaggtgaaagacaaggataagtcgcaagtcgtgtgcgtggtatcgaagaaaaagaataaagatgcagttcatggagtggcatgcgaaccccgtctggactttaagttgtcccggttgagaagtcggcgcaatttagagacaaatcggcatggaaggccatctagagtattgttagagcggacgcgaccaaattataaatgaggcatatgcttaccactgccgcgacgcgtggacatgaaaggctcgtcgttaggctgtgtcgtataggctgcagcccaatatcccgtgcggtgataaccggtgaaggtgcagttgctggggtcgtattggggctgtagggctgtgacatgggggtagagcgatgccaatggtgcgagaagcttatcgggtggtggtgagcatctgctatcgatgctaccccgagactccaagtaatattagtataatgttgtgttatatagagaagtatagaatgtactcacgtagagctcatagttggtcttgtaactcatggtaggggaagtggatggtgtgagttagggctatgtattcctgactcaagttgcgaccgtgcgaaacccggtgaatgtgaatcgatggaaaagacttgagttttgaaatgatgagatgcaagtcttacgaagagacgaggctgcatttaaaggcttggaacacgattcggaaaccctcagccgcacgggagagtccgaacgtcagactgatgtgtatctagtggacgtctagtgtgtcccgtcctgatatatagatttttttccatccaagaactcgggagtccaccccctgacgctgagacaacacacttcagccaataatcgtcgctggttgctgttcatggggtcccatattcgaacaggtttatgcgtatttagataggtagacagacctcggtagctttttatcaatagatatggggagatgcgtcattccagcaacttgttactcaagacgtcactctttttactcttgctagcgagatttatatattgcttcaccgattttcttatctccttaaatgtttctatagtattagactctatttgtcaagccttccaaatcatggctcagtcgctgttgactctgttcatcacgaacccattgcttcatttttcctcaggccaccgggtaagctcaagccatggcgaggcctcagtcgcgtcgttttattggtgcaacctcatcttcggcctccgcaatcccgtctgagcggagaagcgctaagtcaacctgggcttggatgaagtccgattccttcatttctggcgcttgttgggtccgtcgctcgcccgcggggggcaataccttgaagtagctactataggtactacctgtgaaaggtcgctggcatttcatgggctgtagcgtcggattggcagaatccgtctcgcgttgccgcccccgtcgcctaccggaggggccgtgtttgatatggcggtggaccccgacactgtcagtctggcgagccacatatgtgcaggtctcctctgggcatcggcaaccagtatagactggtagcccgtggatcgggcgagcgtctgggggtgtgatctggaatggctcttcgtctggattccacatgtgggccttaatgacttcgtcgtatatagctgccaactgcgcgctagttctggccgatggatggtgtgtatgttttctgtctaggagactgactagacgagtcggagtcaccgcccactgacaatttttacagatccagacccgatgggtggagttatagtgaaagagttctaaagtagcgtccattgattgtaggactgagaagaaagaagatagtcggttgaaagggagtagaaggctaagggcaaccctttatttaaagacattgctcggcgagtatatatcaaaataattaatagtacgaagcccctaagtctaataaactctacgactccgcgcggaggcatagatacgtgacgcgtatcttacgccgtgaactttaacctaccttaaaaggaaataaaatatcaatatctcagtttataataggtaataccaaagtggtatatacgattaggtagccccgctttttctatattagccttgaaagaggtaatagggtagttaaatatactactcatatataatcgacaaaaaaatagcgggctctactgccggacacaataaatatatatatatcttgttggatatatcccctcactctatcatggtttgggtactcttgaaagtcttatgtgggcatcataaggaatttggacctcagcactagaggatcgaggatagtatatataactctgggattgtcttcatgctgaatagtagacttgaatggtccaaaaaaaagtagggctcctttttcaagtgaaccatcgtcatcttcatcacaggtatcttcatcctgtgattcctgtcaatcaactacgcatacgtgaaatcctcccacagtcacgcaaaactcaggaggttccatcttgcttcaacctgtcatcatagtcaactcaatccccacttgaaacaaatttaccaaaacatccagtgatatggaggcattttggtcccagctgacgagatagcttaaggaaagattgaccatttcggttgttttagttatcagtacctgcctcattctggtatatcgtgcgtgctacatatctagtaggcagaaaccggcacaaaacgtcttctctgaaaagcgatattgccttaagtctaattttttcctctcgctttaggcgctcggggttacgaatctaaagcccttttctatttagctatcctactagatttatatataagttgcggatactagctacatagtcagtctgcgccattctcctacatttcagattattctccctctcctttatattgaagtatggccctgtctttcacttacgaccatccttttttctctgattttgttaataccttatattcatcctatgaagaacgctcttcatgaataatatcgcgctttcttcggtagcaggaaccatgggttttgcacgggactactcggaacgctggcaggattctgagatatactattcactaaacaacatatatgggctacagtaagatcaaatccacactaattacaagcattatcttgacgtgtcaccatgaattatctcaccaactgatacagagtgaagaggggctgaaaatacgcctggtgccatggcatgcgaccttgatgggagacataccaccggtgcttttgattgtagtgctgaagcattatatccatgctgattgtgcgaaggttgcaagtatcaaagtgacaaagaaaccctgaatgggtgggcagtccaagcttctccagaaggtgtcttgagatattatggcgagtatagcagccacggtgtgtggtgcatagtatgacacgccattctggcaagatttctagaaagtcgggcaatagggagggcaaagggtgtcttaaagacacagaatcttcctcgcgtgctttgtatgaccatcatcagctcgatcttggcgtttgcttttcagatagggcgttgataacacgtcgggtattttctcaattggtacgtggtagggcggcctgggtcctgtggtagttccggacaccggatgaacctacgggaaagccggtgtttcatcgagacccaagaagcgatgccactcaaaagacacttgcgcaaatgcttgtagtaatgccggctatagcttggtgggaaatgcaccgtctagtccgtacgtctaggcgcgctgcaaaagccgatgcccactttgccaggcaaaggccacgtccgggtttgcctgggcacttttgtcatcgaaattaggtccgagatgtctatacagacaaccaagttgattggaaaccaacatggctccatgttgtatatgtagcctcatctttccctttagattgaataacactactcatacctctgaactacactactgaccgaaagagtgtaatcaggtatgtagaaccgactcgccttgtctgtagagatttgaagtaaacaaaagtggcctcagaaatgtttgttcctaaagactgcccagtagcctcctttcgatagtatgaatggcgattgaagggggtgatataggagatggcggtaatctcacgtagggattccaacggaaaagttcgcccgagcacaagcgagcctttccccttcagcgtctcggggcacttttccccgtctcttactttcggacattttctttcaatcaagtgaatcgacgttgaatcgtataactctgaattcttctttgaaagacaacacatccggccgtcttttccttagggccctcgcgagatggaggattgccgacacttctcagtatcccaggggcggtaaagtatttgctacgatcgatgcaccacgcttcaagcttcagattatgtttgtctctttctcattaatcatgagacatgaaatcatcgattatgtcagaataccatgctaatattcccgtgtttcctgcagtgctctcttccaacgaatccagccgagctcgtgaatttccaccgaatacgacatcaccacactggcacgcagtgtgctgaaatatattgcttactgaaatggcaacaagcgtaatatagcatggtagcctggacttcagcatttctccttcaaagctggacgaaaggcaggatgattgcaagatgtgacccaataccatataagcaccctgggaccaacataatgcaatgcttgtcgcggccgcatactctgtctcgagtacctttgtcaaataagccttgctcaaatggcctcctttacgataagcgcacacttcaatcttcgactgcgttgaccggaagactgaaggcgatagataacgatttatttgtaagtccctccacaaattgacataaagggcttcgacaataataagacggttctgaagtctttccccttcgctgactctgcaatgtcgagtacgcgctctcggttctcatattacaggccagtccgcatgatccggtttgaagtttccagtcgtccaccattgatcgttatttgtgctgtaagccaattggagatgcgctcatctaggtgccgtagccgtgagttatcagatagatctgcgcacgagtatattcctcgcatatttggctgagtacgcgacgtacaatagtctcatgagggacggcaatttctggagtaaaaacaggatcagcattgaaagcgaaccgataagttattcatatggttgctttgaattcaattggaggataacccagcagacaggccaaatcttgtttgccacaacctattgcctcgttattaatagagaaggaggagccttgctttgtctaacccaccaacctatccagatcctccccgaatgagggcagttcctcgtaattgcacacggcaaattcattcatggcaggtaggcaataggtgacaaaagagtcgttgaataagagagcaggcaccatgtgttgttttaacaagtgtagcctgctctcttgcatcaaaagttgaaactgtgcgcatttggctgtctaaaggggtatgaagcttttattggctggcggacgttcatgtctgtctcacaacaaaatgttcgaaagaatcatctgaaaaggcaattcttaggaaaaattactaccaccagatgatcacatcgaagatttgcttgctgcttagaaagaaaatcttggacaagtcattaacgactcttaagaggccgtccaatcataaacagatatgaaatctggatagccctacattctcacgctgtccttgtggtttgtttacattgcctgaggctctaaagtgtgttgaagattggagccctcatcctaagtcaccaacctcggtcggcctctctctaaaccatcggcttttgattggtcagctaagcccatgaagccattcggaagtggaggttggctgttctttgcataaatatgtactgtgggatttccggcggtgaggttaggttcctgatctgcaccagcctcatatcacaactcggccttcactatagcttctccgttccattatgaaatctaccgaggagtagcatacttggtgaataagggctccttcagcagtctgtccaagcaactctcttccacgccgaccaggatttcccatcccccgtccggtagtaccggaagcacaacctgaagaccgttaatgcaaccaacatgaggcacccgtacagcctcgatcttgttgcccagcaggggaccccacttcaaagaatatagcttaaagttaatccacgagctcagcacgcagttgaagccgggaacgtccaggaaagccgtggggaccagtcggtcaacgtcttcaagctgctctaccagagtaaccacatcatcggtgaactgcttatcggcccccagaaccgccttgcgaatctcaatggccagatcggccaggttcagagtgctcagaatttcgcggagaggcaacgagaccgcaacatatcctaagaaacatcctaatgtcgccggatgcacattaggatctgtccgttgtcgcgcgtcaatggcgatgttgaaaacggacatgggatcgccctttagagcctccagaggtgactgtactgccacgacggtacgccagagtagagccgagagagcatcgttggtcgagatccatttatggtcagatggcttggtggcattggttggagacgcatctgccttcaacgctgctaaagactccggggagaaatagaagatctgaccacggtgatttggggatgccatcttcggtggtgctcccaggggtgtggacggaagaagggtgtattctggatggttttcgagcttgcctgtattgtgtccggaaggtcgcattactgattcacggtctttccaaagggcctctggaagctgaaccgcatccgatatattaagccccgctgcccgacgacactcctccgcccagacttccatccaagtataaaacgatgtaccgtcgccagccatgtgcaagatgcaccacgtcaagatgactcctccgcagatgaaattggcctgaacggcagagattggcagtcggtctccggccgagggccaaacagaacggcggcaaaaggtgtcggcgttgaaagaggcgacggggaagaatttcgatttcaactcctcgtagtcgggcccaggggaatcacggaggtccttgaccacgatgatttgcgcgtcgtcattctcctggagctggaatttcaagacacccttttgcttcgagttggtatcgggaacagcctcgcatgcgacctctgggattcgttggatgagaccttggtatccggcttgaaggactctagcaacttcacccaagtcataatccttctggagctgaaaggggaagacataacgaaggtagcccttaggcccaatgcgctccaaagcggtgagctccggaatcggtcggttggtcactttaggactcatgttggtttaggtgatttggggaacttggaagcgtaagtacaagagaagcagtgaatttgccactgagggtacattcctcgaccaggggttcaacaggaataatagggattgttaggaagggacctccgattccagaccttattgaaagaatatgatgtttagtgggtgactagtgccatgccaggttaaatatcgcaatttcggcacaagttagtgctgacagctgccccactcactcctgttacaggatcgcgttggcttcgattaatggctctagagactctcgattcaaatactttcgttaagcagttagatagtaattgtctgtttgatcctttcaacaagtcatcaaacagatagtttcgatcttactgggtttagctagcattcagtggacctgttataaagtgggcctgtcgtctcgggccggacgcccggacggcaaaaaaacccgtgagctaagcgcacgtataactattattgcacttggggtcgcacatcctaatatcatttgctcaacaaacaattagcgtccccaacaggctccattatccgcccttcatcagcaagtccacctgccttttcgtggatacaggttttttgttcgcctagacaggcccttgcagtccgggttcgacgttttcggagctgtcaccgtcgcctgtcaaagtcttagtctgggaactatatagagtatcctggtcgcatcctcacgtggctgtcaacttttcttctttcaggcccgtctaaggatttgttgccttcctgcgctccaggggaagttgatagttaccgaagctcccgtttcatttggctgtcagctttaagacctgaatctacctcgcgcttcttctgtttggtgaaatactctgcagggttgacaagcacgatttgctatgactgaggatccagcaattcgtgccctctttgggccggctccatcggatgtggacctcactgccagcgaagtctctatcaacaatggtgtggtcattgccatgctgtgtctggctgccgcggcggtgatactacgcttcactgctcgaattgcgctccggaatgccttgatggccgatgactgggcaatcatcatggcgctagtgagttcaccctgagccagtctcaaccccgcattcactgactggaaattctgctcgaagatttgtataggtgcctcgactggattaagtgtggcaggtgagaaaccgacttcctagtgaggcaagagcaccctttttgttaactccgcaaatgtgtatctaggcggcggtactggttctgggaaacacatctggtcggtcacgctagaagaattgatgcacctatacacagtcagtttagccacctccccccgaacacgttacaatcctactaagccaacatctattcagttcctattctcttacacgttcgtctacgcttcttcttgcacttgcaccagactctccattctacttttctatcgccgagtcttctcccccttggaagcgaccttgagagcggcccttatattcggcacgtttctcacactctcttattccataatcatctgggtgactatgggcaatgcttgcaagccggtgacctacttctggacgcaattcagcggtactcagggagaatgcatcaatgtcaaccaattctttcttgcagcgggtatccttaatatgctgaatgatttcatcattctcgtcattcctttcccgcgcatcatcaagctacaaatgactgcgaggaaaaagctagcaatatgttgtatcatggctgttgggatcttgtgggtgccctcctcgttcttgctaagcgtcatccgtggtcggagccgatctaatttgtcatagtgtatgtgtcgccagtatcgtacgaatccactatctttctatatttatgggtgccgtcgacgtgacttggctgatgggacccgtgtttatctggtcaaccattgagccatcggtcgcggtcgtctgtgcctgtctgccccatctcgctccccttgcccgactcgtccaccgatcgatcttatctagtcatcaatcggaaaattccggcatgatttcgcgcggactacgtggtgagtcgggaaaagagcgctccacggccaatataagtggcggccgtgggccaacatttgattacgggtttgataagatgaagagggacgcctacgatgatcaaatcggactgacaaactacgtcactgccggcccaaacgaaggcaaaaacccttcggttgagtcattctcagagggtttgggccgtgatcacactattgctgttcagtcgggtttaatgcaatcgacctcaccaagacctgcctggtaggggatctatgacttcaataagctagccaagttagtttccacactaataatggcttggtggacaagtgtttctatgcaaccctataaatttgatgaatttgatcacctcttcgatgtgttgaaacggcctgctagggccatagaactcagcaatgtccacgctatgccgatatactatttctgccgaaggctcacaggtaagcatttactccgaaagaaacactgaagatcgagttgattaaaaatcatctcgatgcctcgtatactatctctagaactatttccgatggtatagctttgttcttggtcacactagcctcatatcacagcagagccaacgcattcacaatatccaggtatgctaccgctcgagcatgtggatatatttccaaactagctgccgacagtgagaatggagactgttcgtggtggacctatgccccttttaaaagtatctgctaagcgatagaagacccgtctagataaagtattatataggaccgtatataggacatgttcttcagcggtcccttcacagcccacacttggctctatcttgaaccgaagcatactcctcgtggaattgtgacaaagaacgagtcgtacgaagcaaagaacacaattagatgcctccctcttgtcgaagctaatactgacctggtgacggttgcctcggctgagagcgtttggatgctcgcggttctgtactcttaatcgttgacgcgtgaaattgcgtgggccgtacctagaaaataaatcgggcgttaatatccagctgaggttcgctacctctcgcgagcgcagaaaagccgagaaagatgcacgtaatagattgaaaaacgttggatcccctgtaccgatggtattgttctgtcaccctgatacgcactactcatgcattagggttagactattgcatgagtagtgcgtatcagggtgacatggcgataccataagtacagaagatccaacacaagcggacacatcagtcaaccagacccgccctgccagccaacacggaaaagatgggcaacaacatttgtttttaggcaacgacgagcagagaattacagacgaacactttctcgagactataaggtgccaacaatacaatatcaggccccggggaaaagccaacctagcccccaccttactcattgtaagcagtttccaaatcatcgggataaggctatgttattcgatggcactgtgtaaggctgttgaagaagccagacgtttgtgaacgtcatttagttgctgtttcttcgttgtaaaacaaaaataaggtttatcttgcacaatacccctaagtgataattcacgcgagtgcccgttctatcgggcgagagcgagagtggcgatgtttggatctaagtggggagacccaccacagactctccccgcgcttccaagcgcaacacaaagctcgatcaacttttgcatgtactatatcgatgatggcgatgctcgcagaaacgaaactgaatccctgaaaagatgctgctcgccaaattccgcccaaacggcatctcaaaatgcccaatggtgtgaggtacccgatagatttttccggggccttcctgatccaggagttaacgatggtgaggcaagccgtggttacaaggcaattttacactttgtcaaacaagcaagaaccaggccatgtgtccggggcaaactactgtaatctgcctaaatataattcacatattggtggcgcggctgtttcccttcaagcacagcagcaacttattgctctgtgtttggtagtctggctctgtctcttttgccgctaagttgatttgtgctgggagtcttctggggtttctgcgtttgaggaatcggggtatttggtggctgttagggttgagacaatagtccattttcatctttgggcataagaagcccttcttaccgtgaatactcgatgttaaagaatagaagatgttttccaagcgttgattttgatcgatttgtaaagtcaactgtagtatctctatgttgacaaaataggtcacattgcccccgaacaggcagccccctcatctcaacctcctcttgaattgtccggggtccattgtaggttgagtctgcaagggtggttccagtcatcgagtacgctagttaatgaatcccgagatgatttcaatgcctgttcgaaaaagcgcagccgagacggctgcgtggcgaagctgaagaccgtccctctcttcaatcaggtatgtgccaccctccttcagtatttgatttttctgctctagcttctagccatcaatgttcttagacacgcataactcccataggcgtcgatagagcccgacaagtcgagctgctggaaatgcaaactggggatcgtcgcgttcgaggtctgctagcacctttaaagtagcttggaaaggttcaatcaccaaggtatatcttgtttctgcgtcctgttgcgagggagagagctgcaatggtttgcaaaaagcattgaaaaccgagtcgtttcacttgccattggtgcatgaccagaagcttcctgtgactcgtcctttttacaaaggattggcaatttactgggctgctgttctccttctttttcttggtatggcgtgctgttcgggcatccagtttgtccgtaagagaaagtcgagggtctgggcaataccgcctccatcaacccttggagacttttatagactaactatataaacatagctggctatgtacgcactctcactattgccatcgaagtcaatcaacgcagtcgagttttgactagaacctaaaggcttttcagcggtctgttagcaactcgttcaatgatggtgatggtgatcaatctcgcggtgttgatggttggtaagtgtacctcatattcagcggctcactggtgatgaacggtctaggagatatatattcaatcacaacacgtttcccacattcgttggagagctcagaaatccccaaagtaaatagagtcaaatttagaggattgaaaaagaactcaaagaacaacgtatctcaacaatggtcataagttcaaaagttgactccagtcaacaagaatggccaagcatcaacgggttgatgggtcgaagcactcgcgcgcgcgcgaccgtggcctgacgctttccgcagtctcacggacagaaccacacatagctcagacgaccgacactcaagcgaggccaggaaaagatccttagtcatgaaaatgtgtgctctttggtgaaatccaagactgaatagcttccagtgcgtcgatatagaagaccgtagatttgacagtgagccaacgtttcttaaccgactcaacttcactcattctcaagatgactctagcatgtctttctcggtgagcatctaaaatggcaccaagaatttcgctgcaaattgttacggtagaacgaaggcatgggttgcaacaggcctcacttaggataggcgtcgtgtccaacgtttgctccctaatagagcacgaacgcgataggagccgagaagtctatataagtacgtcctcttcccccagcaatttgttctacaattctaccacttatttacgcgaagccgagcaggccttcggtttgaggcacctgataagttcttccctttgacctactggatttccactgtactaacatctatactttaattacgttgtggatcgacaagctagaaagtgcttgtgaggatgtgattcccatcagctccactatgtcacccatgccagccgatcaaagaagcagatttgtaatctttcagtctaactaccatgttcaatgcatgtgccatcgctgctagctctgcggagaacggattttgctctgctcttgcacccgatgtgatggaaagggtcttcagtttcatttttcgataccgaggtggctgcctctcgatcgccaccccaaatccgaccagctcgttccgtgctgaactgctggttgcgatctgcactaacccgcctggtacggtcggtgactgcggagttgcttcaacgccagcctgtacgcgtacttcccatggtgccaatgtgaacggattgatggtttccagtgtttccatctcgatgttcttcagcgcgtctgctccttggtacaacgaacgatggtatcttctgaatttcttgatctgtgctgtattcctgcggagaggattggtttctggcagggtatgtatgtccgtccacatcttcacggctcgtctccagaaacggtgttgaacagtggcaaggtgggcctccgcctctgctacactggtcgcgactgtgaggaatgttcctacaatcgcctgcgcccctaccctttggacgtggttgatcggccccatggccttgtccttgcacgcgtgcatccagacattggacgcgtagtccacgaccggcgccaccgtcgatgtaaatagctgccgcgctgtcgctggggataaaccccgaagtcgtcgaagctccatcacggcctccaggcccttggatgctgccctcgcaatatgttccttgtacttgagtttcgtgtccatgaggatgcctaagatcttgacatggtccttgggctcaacggtttgtcccttgatagtgaaaggcccctggtccaatttgtaagccttgggagcaaagtgtatgatggctgttttgtctgcttcaaaagtcgctccgctccttttctcccagtcgagcgcttcattgataattgcttcaatgccttcccggttgctctgggcggttggcccggtcacccatgcggtaaaatcatccacgagcgccatcgctccgccctggctgtcgatctgtctctgtacgaggtctgcattgaagaagaggaataggatcggggacaggggcgagccctgaggtaggccagcctgtggaaggctctgggcctccgacacttgcccattgatttgaatggtcgccgttcgttcgagcagaacgcttcgacccaccggagcaggtcaactggtatgcctcgcgctttcattctctggagcagtcgttctttgcacacaccgctgtaggcgcctttgacatcgaagctgatcaagctcaacacccgtcggccacgccacgctgtgtagatctgctcttgcaagagcacaagcgcctgctccgcggaccgttgctttcgggctccgaaatggctggtcgggagcaagccgtgtgtctttacagcgtgcgagatcctttctgcaaccacggattccagtatcttgcccagcgtcgcgaggagcgaaattggcctccatgccttcgcaatggtgtagttttccttgcgcaatggtgtagttttccttgttcggctttttgagcggtatgatcttcgcgtgtctccactgtctcggcaacatgccgtcttccagtgacgcctggaacacgtcgagaaccctgtgcttgaccgtgggccacgtcatcttccagactatcgccggtagaccgtcttcacctggcgccttccatgatttcgctgcaaaaagctgtcgttctacctcctccaggctgatagcaggcattccaccggctctctttgtggtctggtccccttgttatcaataacgtcaggtagagggggaaagaacttggacagcagctcttctgcttgctcttgatgatccgtggtggtagtcccgtctactctgacgagctgcggtagcttcccgaatgctgcgtctctccggacttcaggtatttagcggctttccagatgttatcgttgtctgcgagaaactcattccagtgcttcttcttttgtttgcggatggcatcgtggtattgtttcgccgcactttgggctgtcttttccaggtgcggtacttttcgtcccgcccgctgctccgagcgagcatgatttcgccagtatgtgtatatatggcgcagctctgttaagtcggctgtccaccatcgtttcgcgtgtggtgacggttttgcctttggagtcaaagcatgcaccgcctcgctgaccgccgccatgagtcggtcagtcttctgctgcaccgtgtctcccgacggagtggcggtcagagctctcgcgattctggcattgatctctttccatggtgcgttcttcagcagaagtcgttcctgatgcttcggcgctgaccacggtgcatcgaacacagtctcaatagcacggtgatccgagccgtgctctgtcccatgtatcgcacacttgatcattaagtctgtcaaattatcagaggccagggcgaggtcgatggtcgactcgcagtccccgctctgtccaccaccatgccatgtctttgtacctcgtttgagtaagctgctaagagcaaactcattcatgagatcaatgattgggtccgcttcgccctgtcttttcagggacacctcgtctcctccccagagttgatcatggcgcttaaagtctcccacaatcatgacctccaccacagcgcccgtgtctcgccgcacctttgcaactgcctttctcaggtgatcgcacgcgccgtccaacgccgaggcatctcccccctcgacgtaaactgatgccataaaaatcagtcgctcggggagccggatgaccgccgccgtcagatccggggattctatagccacttgctccgcttctatatctttattgacccaaagcatgcttcgtatcgcccatctgccttccctccaggtggaaggaatcatcttcgtccacttgtgatgtcccatcggggtcgtcaagagcctaccgtgaattctcctcgcttggggttcttggatcgctagcaccgctgcgtctcgagttgttcgtcattcatcaagctgtcatgcaccgcgccctgttttctcacgttcagttggatgatacggaaggttctactcatgacgtgacggataaagctttcggcagttcttgctatacgattcatgcgggcctccacacggaacgcacttcagaaccgtttggttgcagtcactgtggcgatggccctccgcggcgcatcttgcacacttctggacgttcttacactggaatgccttatgtccaatctcctgataattgtaacattgcgtcggccgtgggcgatgttcaaaggtgctagtcacgccggattctcccccggcgtggaagaacccgtcggccaggagcctccgtgcatcagtgcctctggttagataaacaaccatcgacccgtaggcctttgcgctttcctttctgctgagccacgcgatcttagcaacggtgacttcgttctcctcgctgaaggccgctgtggctccagttcggatctcatctttttcgtccaaaactacagccttgttgacgctgtcgactttgatcgggtacagctcgtcacgtagcacccgggctccttcaccaatctttgcttctgccactttcttgacaagctgatgttcggcttcatcgcgacatgctattcggatccggtgggtgtttttcggatccaccgtgacggcgcgacagcgccagtgcgtatgctcttccatcgtccggatctctgtttcaaccgccgcccggatcggacctgcggacatctttccattttcattgctgaccatcttcgacgtgtcgatcgtgcaatacaacgtgtcggtgaaggtggtcggtgtagtgttcgacgatgagagcgttcgtatgttgctcgggtaactggaagggggagtgcgggcaacatctgcataggacggagaccccgtggtggtgtctgcaggactgattgcaacgcgcaaggattgaatttcgcgaaggatctcatcgtggccgttccgggcgcatggctcggaaaggggttgcggtgtaaggggtctatctgtcaggctttgtagctcgtgtcgaacttctgcgagggcggcggtaaattcttctttgactttctgaagttcttccttgtgcaattcgtctcgccgtctgatctccttcctgagtttaacgagttcctttaacagttccgaggcgttcgggtcctcgctctctgttgatgattccgatgttatcacttcacgttgggctactggcttgccctgggtctttttcctccgttgggaacgcgcgttgctttgctcgatctcctgggcataattgttaggcggtctggtggagcgtctcggtctcaacagtcgcggtggagaattttcgtgttcgttgcggtcgggcggttcaggggttcgtgtctcggcccgtcccgacattttcgcagctccgatatgattgcagagagtcactatttctaccgggtctactacagtacttcccgaaactggtgcaaccactcagaatctccgagcaatacagtctctaatgtgatacagtaaagacatatacagaggatttcgtaaacagtttaccccccagacacacacgctttctttcccagcgccccactcagaatgcgctaatctaaatttggctagctgaggtaccttccttgaggcgtaacaccgtatttattgggtgctggggaacctgaaacccagtccggaccagacgtccttgtgggtctctgggaaaagagaacgggtgtgtccgggggtaaactgttttcgaaatcctctgtaaaagaattagccgcaacgcaagaagatgccattccgcaaggacaggttcccaggatgaaatcgacaactctgaatattgctcggtcccaagcggttcccagcagggagctgcccgagaatatagggaggcattccaaacgagtggatgccgcacttccagggaaacacacgcgacagctgtatgaccgattatcatggaaagaagcaagcgtgctggctcagctccgcacgggcatggcaagactcaatggatatctctttcgaatcaacgccgccgagacagatcaatgtgcatgtggacaggcaagagagaccgtggaccatttcctgtttcgatgtcggaagtggaccgcacaccggacgcaaatgctgcaatgtacccacactcatcgaagtaacatgtccttctttctgggtggaaagtcaccctccgatgaccaggactggacgcccgatttggaagcagtgcgagcctcgatacggtttgccatcgctacgggccgacttgacgccacttgaccttgccgacgaaatgataaaatagctcttcttactaacccccaacaccttgtgacagacggtagacgcgcttcaattgccgaggataggatgttgaacacttgaagaagcgtcttcaagctagtctactaaacgatactaacccacagggaccagctgtgagattgatagccgagatgacataaactgaaagaaatctggtatgggctccaaggaggcacagtattagctaaagcatgtatatttagatcactgatagttgccctttcggttcagccgccgggcgttaatgaattgtgtgtgtgtaaaagaattagcttagcatgtaaagctctaattcagtcattattcgacgtgttccagaaatttctgatgatgcagttcaaattctatcgttgttctttggtgtggttgactcaccggtctgatctaagaatatggaatcattgacaggtatattatgttattccaagctctgcaaatagcacgtctttccggatgcaagcgaagttataagtactttggaactcagatggagacacccttcaactcctcaactacgaacttgtcgaacgcttcctgtagtcgaattccgacctcaccgcaatgtgtctgatcagactcttgagattgtagccccatttcgccatgtgctataagacaacgggtggccgctttccagtacttgtcgccggcaatattgcgcaattcaagcaagggatttgtacctttgaagggcggaaagcgctcctctcccaaaagccaggcgcggattcttacgtcttgagaagacggctctggccatcttttaagacacatgatcttgtgcaagggttgccaatgcgcgatctcgagaagaatcaagccaaaactataagtatcatacgtcttccgggaattgtttgtcgttttcggcgcctcgttttgaatgcctggccatcgatagatgtcccatttagggtcaagactgcgagaagtcgttttgttgctctctggtctcgaatactcaaatcccgacaggattggtttctcgacatcaagagtctcctcgtcaaacggaaaaatgatattgccactatggattcctttatgaagccaatccgccaggtgcagatactgtggagaggatgccagcttccaagcgagagaaatccgttgcgccagagttggcttaaggtagtcttggcccaggatactgtgaagagtcttcaacgcggtgcctttggccgacccctcaggcatcatgaatatccatccgtatcggttgtgcttatcacgatcgtccacatatccaatgcaatttggcgaataaagatgccggggcttgttgctgtgaagcatctgtgcaagaactgcggttcgcaacctggaatctttgtcctgaacagagcctctagcaatgttctctattgatttccattccaaccaagcctcgaactccgtaccatctagatgtagtgtccctctaggccgttccagtttcaggccctcggcctctgtacaagcaaaatgatggctcagcgcgattgcatcgaaccgcttaacactgagaaggccctttagctccttctcgaagtcaaaatttgcaccatttttgaccttcaagatgatttcatttgatatatgcttgattgtcttcaaccgcaaaagatctcgaagtgtctcgtcgttctcattggaaaaagtgatgtttgtgtcgccggagaccttggaaatcttgatcaaactggtgattgcctcaagcatgtctttaaactccttgacgtcgtcacgaacgagaatcatctctcgataggttttcgcagtagcggcatggacccgtttctggcggtagtctcccatcagctcgtggatacgatcaggtcaagatgtggatatccttaagcaatgcctcaaaagcttctttatccaccgcaacccatcgaacgcgaaaagggtgatttacaatctctttagcatttccggctcttttcaacatccatttgataatgtggtcggtccctcgtaagtgcctgcgttcttccttggtccgctcataggctaccgccaagcttgaaacctcttgcacgacattcattttcatacactcctccaatgttgcttgatcattttcttggtatgggttgagctcattcttccagcgggcattgatagttttgaactctccgagaagccacccaattcgagatacaatgctacagagctcaatggcattcgttccaagggccactgccacatctgatccttcgggaacatcaattaagccaaccgcctcaccccaagcaaggagacggttgtactcgatcattaattgcagtcggcatttctcgcattccttcggcatgtccaccatagaagagagaaatttgaaaactaaggatttattagattcttaaagacccatccattgaatgaaaaagacaaactgacgcttgacagaattatcgaacacgtcaaacactaatgatgtcacgccaactgcgagaccggctgctgatgctgggtccattgttcacactttccttctaggctgaaacgggagaaatgtactgggccccaatcgaggtggaagtctttaacactcttgtaccaactgtacggaatagctcaggtatcgatatccgtttccgaggcgtaacgtggctggagccgattcgcccgtgattgcttcatagccgacatgcatgcgtgcagattatccatgcttgccttctcaagaaactgtaagggcccccctggtgttgtcacttactaggtgcagcacctgtccggtaaaggcaagtaagccgatgacgggtcccacaaattttccaaaccaaggatatgaaggcataagatcaacagaagagaggggccagagctttggaagcaggcgaaatgtgagaaaatggcccaccatttcatctaacagcacaggatctggatgcctgggccctattctccaaactcgccactagacaacgcaccggtggagtctttctactcattagctgtatttattgcattctagacgttacagtgagtctgtcaatgccctgggtgaactctgcttaatgttggattccaaactagtttaagacactgacttgctttttgattttgattttgatttttttggttggccatggtatggtgcatgcggcccacgtctttacctcccaacacccgtcgggatcccacccgccgatttctgacttcaccgaggggttctataatcaatcagtgatctaaatgaggtttcaacaaagcaggtcggaacacgtagtcgttgagcacaccatacagtattaccagttgggcggtccttcccatattcccatattcttatacgttctaccactataaaatccttgacacctcacctcccaccggaaacgtacaccggcgtacgtacccttgatccgaacgaactgtgtcctgtctatgtcgaccaatcgcctcgcttctctccttgctttccttcgttggcttccctccacctcactcaaacccctctacagtgaccaagcctaagctcaagccgacatcgccgtaaattacttgttgacaaatggtgtatcaatccgtgcagtaactattcacggtgtcacacgtgggagtttccgtcggtcggcgcccggctgcgcccggctgcgcgtggtagtgaaggctagttggggactagtattcgagtaattcaacgggcactcgaagaagccaagacctgcccaacatcttcattaactgtttcgtattcgaaggattatcattggatacatggaatgaatcctagatagatcttcgcaaatttaatggccaaaatgataaaagaacaactgaagtgtcttcgttatcaaaggacgtattcccaattcttctacctcaatagtatacggtccgatagtcctttcgccgcaatagaaattagcacctatcatctagatgtagagcaaacagagatgtgactgtcgtgctggaatgcttgttttgatggaatgtttgttgtggtgagccgtggaagtttatttgagtgttgatgtgagtgttgatgtggtgtgatgtgtgttatggcgaaacattgctgtttgtagtgaatggacgggcggtgaagagaggggtggtcaacgtctcacggaggctgcgcggtttcttgccatgtcacccatcatagaagcatcaattgcattgttttgattcggcaagcgcgattttgatcccttgtcggcactctttgttgtaaagcctccaaattcaattgagattatctatttcaaaaattgctcaactatgaccacgcaatatattgtacgctcaagatcagaactacgaagtgtgatgtgtctcgaagataagaatcgtaggtttaattcaagatgaatatgcgataggctctgttccttttgtagtcagagccgtttctctacatggatattgtgtgtcgctcgaatctaccttataatagaatgcctacattctagactgagagtagctttcgcttgaggtcaacatttcattgggagctttggctcgggaatatctgatccactccttctacacgtaggagccgtcgcaaatttgtgaatgattccccgtcagcatttccgattcatagtccacctaatctctcgtaaaagtccactacagcgattaagaaacggtcgttactttctgtggggcctattcccgagtcatgcgatacagcatgctccgctgctgatatagcatgattgaagtccgatggggtccaactagccatctggaaccagaactggtaaagacactctccacgatcgccgctcaggaccggttggtattcgcataggggggctctaatccacatccggccctagcaggcatccgctgaaactcctccccaagcaaatatggcataagggcttattaggggtagaaaattaagtataggctgtacgggagagtccaagaggtcctacaacccgatggcttttgtggtgctgttacagacttcaaccccaccttcacggtaagttgttcgaacggtgatatgccaggtatcgtccggacgcgatgagtttgagaaaacatcatcgatgctcaaaggacagtgacctcgggaggtagagaagtcggtgatttgctggcaagacctgcttgcgccgccaatcgcgatatgctagaaaacgttcccaatggacaaaggatattacatagcttgactgacctccagctgctatgacctccaacgtggactggctagtgctcgggcttggatagaaaagcgcaggcttcgaaatcaaattaaacaactttcggtccaaaagggaggaaaaaacactcctgatagcatgcagctccgtctatgtccgaacgacttgttcccgctcgctcgcacatgtcgacgagctcagcaacgctgagaggaagagggatcaagggactgtatcagacgtagttcttgagtcatgcgccctttctatcgttcggccatcctcgatcttgaccatcgatttgaagctgacatggccatttgttagttgattcggctagaaatgacgggactttcgcctcaccttctccataatcgaataaaacctagccagtacgaagatacggctctagcaagacaaagcatcggctcctcccggtgtcttcgattttcaagctcaaaacaagctagacgccgtctgaggacaacgatggtcacccattggatgccggggttccaggccgcaagtaggtcatcctatgagagggatcgaatgccgggagacagacactgcgatgcgctcctttggatatgcgtcaggtaggaggcataccaacgcatgatctgatgaaccaaatcgactgggagaaggtcgaggtagcgactcgttgatgccaccagtagtcatgtggaagatatagagcatgtgatggtattaatgtagggaaggccgagcagacaagacagttgctcgcattcgagtcatgggaatctgagtgtgtcttcctgcggtgagacccgagtcagcaagtgttgatccagttggacgaggttttgtactttacgctgttgatgaagaatccgagtgtatgcttgaaacagatcatcaacaagatttgtgatcgtgcctgctgaccaactagattaccgccaattcagttctgcgatgcagtcaccaatataccatgttgtattcaggttcgtcgcactctccggctctcgcttcgagaagccgcgctggatgaaccgacaagttcacaagatggcaaaggcgcatgacgactcacgtgtgacaagaaattgtacagttgtattaggagacagcttcgtgcagacagcgagaggttgaggcactcggtcgttcagtgtgtgaaggcggtgaggaaggggaagacgcaatgacgcgtcggcccctggtcttatctgactcggcgggaataggttactcgccacaagaattgtcgcggtcggcgatgggctgctcctacaacggcatagatatgtcagtggtgtttgtgtctggggcacagactggctgaaaatcaaaatcggcccagcacgaggcgcgctattccactcacctcatcgtggacaacgaacgtctggagcttatgtgtcctgttgtcccgcgaccttggtttgcggtatttttcgtagaaaatatcgcatgatttgaagtgacagggccagaaagtgtgtaagccgtgatcctgtgtggagccctgacgtagtgctggttcgaactcaatttggtgcgctgtcaacgatttcctgtccatcattagctttttggtcggcgaggcaatgcatgacccacatgttctgaaagaaacacggaaaagggctccgtggctggtgtatattggacggaatgcatgtgaatctttgtttcacgtcgtctctaagtcagtctagtctcggacagtcacgttgagatctacatacctgtatggaatcgctcttttgcatcgatttattcaggggcgggacagtggtcggctgttatggtggagtgatgttcgcatagatagtttgaccaactagccccaatctgcttctttgatcagctggcatgagtggcatagtggacctggtgggaatgtgggaatctcattttcacaagcacttcctagcttgtcggtccacgatgtatccatagatgtcagtacagtggaaattccagtagggtcaaagagaagaacttatcaggtgcctccgaccgaaggcctcgactctgcatagccaagtgatagtattggagaacaattcgctgggaggagaggacgtatttataggctacttggctcctgtcgcgtacgtgctctattagggagcaaacgttgaaggacacgacgtctatcctaagtgaggcctattgcaacctatgccttcgttctaccgcaactatttgcagcagaatcctagtgtcattttagatgcccagcgaggaaaaggtgctagagtcatgttgagaatgagtgaagttgggccggtcaagaaacgttggctcactgttaaattacggtctaatattgaggcaatggaagctattcactcttttgttttaccaagagcgctcatatttccatctaaggatggtggaattttcctggcctcgctcgagtgttgatggtctgagctgtgtgtagttctgtccgtctaagctgcggaaagcgttaggcgacggccgcgcgcgcgggtgctggaccggtcaacccgttgaagcttggccgtccttgttgactggagtcaacatttgaacttatgaccagttgagatacgttgttctttgtcttgttcttcattcctctaggctatactctaattttaggatttctgagccctccaacgaatgtggaaaagaaggttgtggttgaatatatatctcttagaccgttcatcaccagtagctcacaaatatgaggtacattcaccaacaaccatcaacaccatcattaaacggatgttgaaatccatgcataaatagacggtttatacccgatatatcaggcatgaatcggtcagcgttgatccttccatgaagagtatagatcaggggaagtttccctctcatttatatagggtctctctcccaatgagagagagatcagacttaaacacctcagcggtcctgacgtatatgcttcctcagtatcatcgtaccctcatgttttaacaggttatgagcccgggtcaatctcaggggtcgaaagttcgaaccccggtcccgttgagtttcttttccgtaaaattcaagaataataagccgctagccgtgctaattaccaccgggcgagttggaatctctgtttctacgatactagtcacctaagatagcctattccccgcacgatgatgccaggcttacggggcgtgttgagatataagcctgacaccctaaagcagcgttgctttttggtcgaatggttaagaacctgcatgttttagctaacagaatgctaaaactgaaaagctgaatacgctggttgactttcatggtgaaagtgagaatgagtaaccacctacgtctgctagtctataaaatcctccaagaattgatggacatgctaatgcccagacactcgactttcactacgatcaagatggatgccccttacagcacgccagaccaggaagcagaaggagaacaacagcctagtgcattgcccatcgtttgtgaaaaagacaattcgcaggaaacttccgaccatgcaccaatggtaagtggaacagctcgacttcgaatgctcttgctgaccattgcagccctctacctcgcgacaggaagctgaaacaagacacatcttggcgactgagcccattcaacctattctgaaggtgctagcagacctcgaacgcgacgatccgaagtccgccttccagcggctagacttgtcgggctatatcgacgtctatgggagtcgtgcgtgtccaaacacatcgatggccagaagctagagcagagcgaccagatcttgaaggaggctagcacacacctaactgaagagagacatggactttagcttcgccacaacaagcagctgtctcggttgatcttctttgagcacacactggaatcatctcgggatcgactgactagggtactcgattactggaaccaccctttcagactcaacctggcagggctgccaggcatggcaagagaaggttgaaggattgtatattcttgattgtcctaggtcttacttttacaacgtggaaaatatccaatatcgcaatgaagagaattaccgcatggaaagcagcttatatattttcgagcattcacctagagaagggcatattatagcctacatggaatgtgtctgcgaataatcccgcatgttttgggacaatcctacttttgttaacccaatatattatagacagaaactacggatccaacggcaatgtgggcagcgtagcgagcggagaagtgttgattgacgcggccgtctcgtattgcatcacctatctgaaatagatgtcgccagctcttacagaccacatacccaatcatcacaggaggctgagctacctcttcaccaagcagtatcctatggctcggtagatgctgtcaagcggcttctcggacacaagggtctgaacttggacgcccacgacccgaaaggctctacgccgctccatctcgccgttcaaagcagacgcctcgaaatggtcaatatgctcctgagttaccctcgtgccaatgtggactgcaaagacaaagaaggcaatacgcctctttggctgtcaacgtacctgtcatacgatgagataacccaaaggctactggccgagaacggcatcgatatcaacttcgtcggaggctacgggaggcgcgaggggccgtctacatcgctgcatcacgcggcagccagattggacactgcagttttacggcagctgcttgcggtgccaggaatagatctcaatcactgtgttgcaggccactctccaatctctgctgccgcatcgcgcggaagtctaaacacggttgcttgtctactgaatatggcgggcgtagagattaatggaatggatctaatagatccgcctatttgtcgagcggttgcacatggccatctcgatgtggtacggcttttagtgcaacaagacgcacgtctgaacatcaatgaaagcacgatcgcaactcacgacactgctctctgcatggctgcccgtggcggtgacttggagatggtccaggcactactacgccatgatcaaattgaggtcaacctcaggaatcgatggttgagaatccttgatgttagcagtcaagggtggatatttctcgattgttgatgtacttgtggtcaaacccagactgaaatacttcagtttgacgagatccctggacctagcaaggaacgatgcatccagaaagccattcaaagcaaaatggaagacggcaacactccgcaaagatttatgaagcggtctccgagaaggcttactatgtcccgacattatatcataggcttgaggatattgaatctactaggagacaatgcaatccctttctcctgaaggaatggttaacaaactctattaccattagctggtgcaaaatgaagccagttcctgcatagccttgaaataaaacggacaatctggcctttgtcaaattgaacgaggtcgggaaagctgatatggagggttgacacgcactggccgtggccggaccgcagatcctgacggggttatcagaggacactgatgcgagtcggcttccatcttgcagccaggcaatcgaactgacccaatcgctgtgcccctcgagggtttgaagaaggactccaatcctttttcaccaaggactcattcaaagcccaatccgtctctccctttgataagatcccctcgcgaggctcaacgtggggctaaatatcagaggtgaattgtatacctgaagggggctactttcaattgctagcctgtggtatagaatgaatcgggaggcgtcttgagctcgatataaaagggcatatggttcgcctttttcctattataatctttctagtgtcagaagtggagatggtttcggtatatttctgtatgagctattactcacctgaagtaaaccctcgagctttagcatagctgctatgccttgtgatatgctttttcgaatgctcagggcttcaagccagtgaaggtattcttttcgtagaaaaccaccaacaccctctctcatcgacgtcaaggtctttttttttcatggcatctgctgtgatgaagatggtcaatccgatagacacacgcatattgtgcagctgctaacggattcggactaggtggtataactttcacaaccggggaatccaggaaactttatttggaagatgccgcgctgaagtgtttaaccatggcttgaagagagcgaaagaaaatcgtatggcgttcagcttctatacctccagggaaaccccatttcgcgtctcgtctctcttgaatagaaattcctttgcagacttatggacgaaaatgatggtttcttcgcgcacagtcaagaaacgagccacaaatcgcgattgtcgtgtaaatacccagaaatccacatgacctaccaaatctctggcatgcatgctcaaagagtaactgttggatatagtactataaatgggatttactgcatttagccgcgcaggcatgggctagacggctagacctaagcagcagctatcgggcattggtagtaaaacagtaaagaaagctgcattaaaagaaaaaaagaaacccccccaaggtaaataattcaacatgcgaaatctgtcatccttgggacatacatgccacatcatttgagccgctgttgaaaatacttttcgaaggtggttgtctcgaacccaggaaacaaatggttatggacctgtccgcgggggcgccaaaaccgcccttgtccctgaaaagccttgaccaataaccagaagtctgctggaaacgcgctttctgcagagagctcccgagggatggttgatgggtttgccacgaagtcatgcatttcattctccgatataactttccgttcgactggtcgctggaagtacttgcccaataaggccgcgatttcgttataactgatatggtcgctcacgacattaagcgttgcattctccgacgtctcaggcgcacatagagtttcaacgacgaaattaccaaagtcgcgaagattagtaaagtcggcctcggcatcgggcctgttgactatgtggagagtgtacttctcaacgttggtctgggtccaaggacaccaaactttttcccgctcctggtcgtagaaatctccgcaaccaatgagagtgtatgtcatctggccttttttgattgccggatggtgaagcgctttctcattgaagacgtccttcacattccacaacttggcaaccaattagcaacctaatgtattaccacggcgatagttggctcaccggatgaatgtacccctggctatctcccggcttgcgatagatgtgatgcattccatactcgctggggtaaaaccttttgacacccgcagatgctgctgcatcctgaatattgggttgggcttcaagtccctgtccattcagggcactgatcacaacatccactcctctcagcgcggcacagagctcgttttcttcaagtgcgaaaaggtcaagaactttgagctcagtgtgagatgcctggtaagcagcatccttgtcagaaggtgaaacgatttgcacaacatggaaactctgctttttgcagtcgagaatagcatgcaatatataccggccaacctggcctgttgccccgaagagcgcgattgtctcgaatcccatgactccaacacagaatgaagattgatggctttagaatgaagattgacggctgttctctggcaaacatgccctgtaatgttaaagttgccgtcccccgttgccactccttacatcatctgtgcgtccgtcagcagtcatagcctggcctcgccataacctgctcagacgccaagttctccaactgtgagatatgcaaatcttatcagcacggtattgcgttcaaaactcgtcccaaatacccaatcgataacccagattatcttcccaaagcagaaaaggttgtatgggccataacgtaaaagtatgtttgcttcgagagtggttagaatctgaacgcgcattccagcatgaacagaaaaggccgccggccattcacaatgcccttggtcctcgtctccgaggtattcggtatgtgaccagatagcaatctgtgcaagtccaatgggccgctgtaaatgacgcactgtcggtattcggtctggttagactataggctaggtcggtgatgtaattgtgaatcattcagtctggaggagacttggctcttattcttcagcgttattagaatggcgacagaattggaacagatggagaggaagtgttatggctcaaagagagtataatcatcaggggagagcttggtgcaggagaagagtatatagcttctagaacggtctacacgccaggacaaagcgcaccttgccacttgacaggggaacttgatctcttgtgactgcaaccgggagaacacaaaaagggatcgggttgtagcctaccgttctgtctccgaagtctctgtgatataccaaatctcacctgccccagcagtacctctcgaacaacaacccccgttccatcggacactgacggccgataattttgggcttgtggatcgtgtctggacctttgcaattctttccaatttctctccgggccacaaatagaacctccctgatctactgtcccgtgggtcgtcgctgagagatctgcatcgcagaaccgtacctgcgtctgtctaaattcacgcgtcgtgtttgtttggtccaccacgtgctatttgtgtccagggtctcgttgtggtatgatagtagcgttgcaatctcgcgaggtggagtgatcgacgggaacctagctcgtgagtcttggttgcaacggttcacatggttgtcctgaaaactagacctagtttcctgttgtaggctttctaataggtctggactctttttttttggctattatccgccaaagaaaaaaaatcatcatcctgggtttgggggtacgttcatagcgtctgtgccaccaggtggctagtaaaggcaacattatttggctgcgagtacgcaggaaagaaacaatattcagcagcggggggctagagatggacaggatggattttagcgagaccaaagagtccaaaggccaaccgcaggtacaattgagtgtgtctgtcggccacaaagcctccaaaacattatttcggcgtctgttgaagcacttcaaccctcatggaagagacggtgactgtggttaaaacgggcagatgtagattgccaccgcatggagcgatttaattgcaaattcaagttatgtaggaggaaccatactgttgcgacggtacactcttttcaacagttgatgaaagtggttcaccacactcaacgcacggttttgagagaaatgattccaggtcgagacttgactctgtaggccacaaggtctccaaacaccatttcaaagtcgttcaagtcgcctcaacgcctatcaacgaggcaatgattctcgctaccatctgcgcaactggttacttggtggatccgtagccgaaaaaacatggaaggggccggattcccagcccaaaaaactcaggacctcggtcctcacactttgatacatcatagtgtccctcccttgcctgcgggcctgagggcttccgtgaccacggctgtcgctgccacgagcccagtgatgtaagacttgcactccttcacagccaatgagccctgtgtatgtaaaaatgtgctcagtcatgcaagacttggctcgccaaggacttgtcatgactccccagcgatgtgcaggcaccactccgtgtggtgctggggattagtattcgagaatccaagagtattcgatgaagcaaagacctgcgcaacctcttcatcttcttcgtattccgaaccatcatttgagagatagaacgagccccagataggtgcaaatcaatcaccagaatcgtaaattcaaggtccaatcttcgttgtcgagcgtcgtattcccaaccctcctgccttgacagtttgcggtctgctagtcttcccgccgcaatagaatgcatctctgccattcagcgcgtagagcgaacagagacgtgagtgctttggtgcgtcgcgcatgagtgttgatgagtgttgatgtgaggtgatgagcgtggtggtgaatggtcgggcggtgaatgaggtggtcaccgtctagaccttgccatcggtccatgccaccctcagattatgtaagtttcctgaatagggggttcaactccaaattctggattcatcggttatttacgtctatcactgtcacctaccgccataaccactggtataataggtaatcgatcctaataacggtgtaccctgttatataccttattatatatattgcttttatgataaatttattggtgagactagtaaacagtatgatgtgagtggatttgtaggttcaaccttttatgtggtcatatatctatttacacacattgtactcgcatcactatattgattatacagaaaaagaaggtctgtataacagcatgtatttgagatcaaaaatagtaagtcaacttttactatgaatatagaaattccaatatactgtgaaaagtaatgattgttttgtctgatctcttcatacatggaaagaagcatcttattcatgcttcttgttcgtatactcccactatgacggatcagaaagactcggtgacaacaacgcagaaataagcaaagacatgactgaaagcagtctcaattgaaattgatgcagtaggataatgacttgtatactgagagcagtaatgtcatgatcaaactgcatactgcaaatggatctaggcttcttttggtaggagcctggatgccaatcctgcatagcagagatctgcaggataaccccacgaattagggttagcgttgtaaagatgaaaatggccagtattaatggaaattaacctggattttcaacacactatttctatttattttagttcgccctcccaagtttcattcagaccagactcaacagtccacggttcaatccatgtcgtccgctatatatccttctacccaactaatccgaacacgtagtattgtgggacctgtacgtggctaaaacattgtaaagtaaatgcgtgcgtgaagggcttgttaacaagcggcccatgggccaaccaacgccatgcccgcccatagacaggtagaagtaactcattgcgaatccatgggcctcttgggccgagtcgaggtcgatcaatatccccagacgtagcaaggaggttttcttgtcatctcatccacatgatagatgtaccaatttattgattctatcttgcaacccatctctagtgcccttctgatcactcgttgaatttgcatgcagcccccaattcgattgacctggtcgaatgcaaacaccagactgccctccgttggttcaactatgaataggcaatacgtacactcaagatcagacctaccaggtgtagaagcatttgatgaggagccgcttgaaatatcatttgtggctcaactgagcatcgtgatgcgatagactctgctctgccttgcgtagtcgaagtcagagcttcagtcggcgattgcaagtcactcaagcctactctactgtaggatggctatatcctagaaccatcgcgagtgtgaaagtgaattcgcaacgaagaaaaccaaccaagaatatccgatcggctcctacatttgggagtcgccgcaacattgtaagtaatctccgcgttggtaactagaatttatatcgccagccgtctcccatgtatcaatatccactactgcgcccaaaccgccgatcgttgctttctggggcgtagtacccgggttcatgcgatcaagcttgctccgctgccgagagaacgcagcaggctctgggtggtgttgttacagactaaaactcatattcacaaaggatctgcttgaacagttatatgccagatgtcgtccagggcgcggtgagtttgacaaacatacacttaatgccgaaaggatagtcgacgcatgggtgtacagaatctgcttgcgcgcgatatgttaggaaatgacatcaatagacagagacacagggccggcttgactgacctgcagtttcagtgacatccaaggcatatgcgactttctggatatttcttggagtttgatagagaaatgggtgcttgggatccaagtctaccaaacatctgttccaaaggagacatttctgatgccgacttgatagcttcgtatattccgcttggttcgtttccgctcgttcgtacacgtcgagcacctgagcaatgcggagtaggagatgggacggtatcggatggtatttttggctctttagctggctgggctgtgcctgtatcctttcggccttcaactcggaaatcgacatttcgggttgtgttttggattctcttagccgcggctgggtggtttccaaggccatggtagatccgcgagccatggagatttgatggtccagtaaatttatctcaggaagagatggcttgatttgtagggtagttggtatggtagtaatagggatagcatctttggctgtgtctgtggatcgactgtagatgcttgaagtgttgtcgcgcgagtgaccgggaattcgatgttggaagggttcatatcggtcgcggactgaccacgtctcggctctctgaaatcgacgtacataggggacgagagttgctggcgttttaagaacgaaaagtccatttcgtgggcgaagcagtcaatttgtgctctaggatattttctgaacggcgttcctcacattctcaccaccgttgacgaaccgccaactcttagccgtagaccagcaccggcatagtgccaagctagtctgttgggaatttcagcaatgtttccaggcgcgaattataccgtcatactaatgggtggtatattcgaaaggctattaaaccaaaagtgataattctccaaaattctcgctaccatcgctcgatttttcagtaggttttggattaatataacgtatatctggggatagcctttccataaaacggtatacccaattatgagcaaccagccgatcagaaccagccctttctaaaagccggtttgcagcacgctcagtaatgtctgagtaggagaggcaataggctctatgtacagaaataacgcaagatctcaatgcccgttcttgaatcgggtttaatgccttgctttgactagcaatattggaatgccccttgcgaccgtggacgggaccgcgtagccgcccgtatcgaagtcccaattctcgctccggtctggcgagattgggtttatcgctttgaagcaggcttcgactgccttcaaagtttgatctcggtattttcaatttgttccgacattgtggggtgggtatgaaaatacgtaagaagtcgatgtaaatgtgaaaatttgctattcggtggggggcaccaacactgggtggtgtgtcggtgggcttggcacgattatgctcaatgccactttagtgattcacaagctgcatagttgcatctgtgcgtgcgagctattgaaactcatctcccgatgatcaactgcctctatctgcctggaggatccctgaaagctcgaatttgttgtatttggagggaccatgcgctaatatgtttgtgtcccagagtttcgggctttctttttctatgatactcgcatagagtgtggcgtacagaggactgacgtctttccactcggtgccggtacttggtttccccccttgcattaaggggagaaaaaaaggagcaaaagcaatcggcatgagttgaattccagattggcctatggttgagcagcattgtccctgcgacaggacgtgacaagatgtgatacaatggcattcgataccgagctgctagaccttatccagtttactaaaaagaggcttgccatatgccgatcgaagtatacatcgacagcatgttcgacgttcaggatctaggctccacaccttgcttggatcaaatccctttggacgaacccatttctgtatgcgggacctctccttcgggtgccattttagcctcaactacatctgtgccttcccaggtcacgaggtactcctgcattccgagtccaggaccccggtcaagtaaggttacgatagctcagaaggcgaagaaaattactattaatatatcgttgcctcgtcaccagatcgtctttcgttcttgctctttgaaatgccgtccgacttgttcctctgacttgcttgaaaacgtaggtccagttccttcgttgaccgcttggaaacataatatcatgtcgacgcccgcgagcggtcggattgcgaaactatccggtgtcccgtctccctatgcatagttgggattcatcgcatgtctgtgccgtcacaccaggcccaactgttcggaattatcaacccgatcttccctcgaaacacaggtttttcaatatggcattaccagaattagcgtggttaacctccggccctctaccttctaaaccccgtggcgggagtggaccgcggcatcaagctcgctcagcggatacggctgaaataccaggcaggaatgaaagcttggtggatttagttccctcctttcagacccaaaaaatgacagctcaacccatagcaccacaacctcaacctcaatgtcaacctcaacctcaaccctctgataaacaaactgcgcttcccgttgctatatcgcccatagaatcaaagccgggcccgaaacaagatctgaagccatttcaccgtcgtctactgcaacttgcccaacggccaaaaaggaaatcaacatccaattcaagaaaacagaagcagcagctccagatcgaagcattgataagggaaggatatctgatccctgcgcacctaccaaaggtgtccaagggacaaaaggaggcaaagcaattaaaaggaagcctgtcactttctgtttccagatccctttcgaaatccaagaaagatgtggaaaatatcggacagccatggctggaagccaaagctgatgacaggaagcgaccaaccgaagtaatatgtcgcctggaatccctggacttagacaactttggctcaatggtcgacgtcgcagttccacccgcttccgatttcgacgttttagtgccaccgccataccgatccactgatagcgggccctctcaatcctcgtcgacaatgccaatgtcgagctctatggcagaggcaaacccattcaatattatcaaaccagcttcatcgctagcatctaccagccattactacagaaatgtttccatcgatgaacaggtccaacggccatcaagttccgaagagcctaatacccgtgctacctcacagaataccaaatctgtttcaaaggccactagtaacgctcctgcgggtgcgaatgatacagcatcacaacccagagcctcctgcgatagctttagaggggaccaaatagaccaatcttcggtccgcaacgtgactccatcacaacacacactgacactcttccctgatgttgtgcctcctcgcaaatcaagcatggctgcctggagagcttcagaagttccccggtaccagacaattaacaatgtcgcgggattcccggcattgccgatatcgagttcacagtccgggtcttcagacaacacaactgaattctcaggcgactcacgaacatcatcagatgtctttacagatatcccagcgagcgtgacagagccgagatgctccggtccccttgtacaccgtgccgcttcagctgctgcagcttctgcggagaaagcgcccaatgagcctgcctcgccagatacagtcaaggcccgaccgtcctctttttccatgaacacgctgaagacgttccctccgccagcgcctacgaggcccccgccatcattgcccgagtttgaacgctccccgagtgttcctccggacttccctgcccgctccattcggtttgttcgatccggaccaatatcctccacttcacagacctcttcagaggttgtgcctgaagcccaagaaacggagtcagttattgacagcgctcgtatgctcgactcatgcccagcagccgttcttggtagtatcgaagctggaggatcaatggctgatgatgagcaaagcctatacgctctgtcaatctccgattattataggccaactccaggggtatacactgccagagggggtgcatctagcatacgcatccctaggatgcaagaacttcctgagacacgaaatctagtcaaagcctcagaggggcagcctttggccgattatcctgtcttaagacacggtaccccaacacaaaccaatgccaaacatgctttgaaagggctccataacaactaccaagtcttccaaaagaatatttcttttggtctgccctcgcccccgcctactgcccctctcccaccagctcccccgcctcagaacccgcctcccccgcctcctgggtgcaggattggccaaggcaatgccactgctcctcatgcagctgagttttcaccgatgaaaagcatatgggtttctgatgggcctggatttagccgaaactccatggtttcccagaacgacagctcccgatgcagccgtcggaataaaagctcccccgattcatacgaagaaagccgccccgagtctcgacgtgagtctcgcgtttcctcatcaggcgatgagtttttcagtcctgcagaagacttccagccctcgcgccgcgagcccagtcaacacatggaccttcaggcagtatgtcgagggtatgagacagcggatgcaaaccagacgtctagccgcccgcggcttcgttaccctcaatctacccactctatgacaccacaaagccacagcaaccacaatctcgagaggactttgtcccagtcacgaacctctcaatcgacgcagcgatccggggtatctcaaaacagccatagcccacgcgcgtccccggctcaaatagatcactacctcgagggccgcgttgcaaacctggagcgccagaaccaaatttttcaagccgccctcattgtagcgcttaatgctaccggcaaggaccccctagagagtctcaatcttgacccgaacatgacaccagctttccaacatgatccctatgccagcaattactcaagccgtcattcctcccgctggatcagcttttctcgaagcagtgagcacagtgggtttaagacctcaagctcatacaaagatggccgagccaatgccaagcagcttgacaacatggtcgaggacattgagtctagatggatgtcggacaagtccagtctcagtggagctcgaatcatccgcaaacgataaacaacgatcttttgatcccttttcatatttttccctgcttcagatggagactgctttgcaagttctgttcggctttgttttgccttttctgtgaaagacatgatactcagcgagtatgatatattcctgttgatgctccaagtaagccaagtgtttgtatagatcaagccaacggcagagcttctgcactatacgaaggcctcgcttgtcgtcatggtaccattccactatctatgcacaagtatcattatcacctgtaactggaaacatatgcccagaatagcaaagctcaagacctgtcgcaagctcagttggccaaggagcaggagcagcagtcaccgcgcactgaacgatgtcttgatcttttccgatttgcttacatcaagttaggttttgaatttgctagagcaatacactgatacatagattgatagttgatagactgatagatagcattcccttgttgcggagtgacgcttcttgctcgcttttgctaggtatattttatcatccccgtcttgactttcttggaattgaaagaaaaccctgtggagagaaagaaccgaccgtgatttatattttagaaagcctcactttgtgctgcgactttcttggtgccatttaaatgctcagtgggactcgagtgagggtcatgttgagaaatactgataccgagtcggttaaggaacgttggctggaaatcaacccctccgtggccttctaaaggtgcactagctatccaatcatccgtgacgttgagtcgactgtcacattgaatcaccaaaccgtcctacgatttattcactgggagtcatgaattagcattcccagcctcgctttactttggttgtattattattattattattgattcctcaggctttttacgaccttaggtcgtaaaaagccccctagctagtgtgtactgctccgttgaatatgtacatttggtgggttgaccactgcgcgatcttttgtaatggcagccatcattcaacttcgtcctccaacaagcaaccgttgcgtcgccatagcgaacgcgatgacagctttgacgatcttgatatcgggtttccatgctcttccgttgggctcgcttgtcccgtctacactctctctgccttccacctaacgtccgcggtaggttgccaaaatgaggccctgctgtctcaatcagctctcgacgctgttcgtcccaccgtgtgcaccgaagtaggaagcgctggatcgtttcgcgctcgatgccacactcgcacgaatcgctatcacttttgccaattcgatgaagatacccattgagtctggcatgccccgtgcggagttgggctagtaacgacgccttctcgatttcaggcaatcatatagcatcttcgtgtgaggtcctgggagagctgaatccagctggcgtgtaaactggcccgtggtcgactgttggaagttgtccttccggtgctgtttagcattggcccgtgcccgtcgcaacgccgacgcccggagctgggttcgcgcccatggcggggtgttgacttcgctgttctctactgttgcttcgcgtgctaggctatgcgttcgtgctgtatgctcattgtcctcttccgttggcggctgcaggttgaccttagcgcccatcttcgacagctgaataatctcttcagtgatcaggatgatgagagcttggccgccctggagatggggtttttcaagagaaaacaggacggcagggttgttcagaacaatcgtaatgtgtattttccacggcgacatctggatgtgagggagcagcgtcctgnnnnnnnnnnnnnnnnnnnnnnnnnnnnnnnnnnnnnnnnnnnnnnnnnnnnnnnnnnnnnnnnnnnnnnnnnnnnnnnnnnnnnnnnnnnnnnnnnnnntaaccactagtatagcagatcattgatcgtaataaaggtgaatcctagtatgtagtataattaatatgtcgtgtttgtagtaaatttactgatgcgactggtagacattatattgtgagtggatttgtaggttcagcatgttttgtagtcatatatatatttacacgcaatgcagacgcatcgcaatttctatgcatttcggatcacactttcaatttcacttagactcgatagtccattgcttttactaggtttggttatagctgaacacatccattgtatacctttctactcaaataacctgaatacgtagcactattaaatgacacgggacggggctatggtcaaccgcccgcccgcccataggcaggggggaaataactcagtgcgaatccatgggcctcatggcccgtggcgaggtctatcaatgtctcaccaacgtagtacggagattttcatgccatctcacccacatggataaatgtatcaatcactatagattctatttcgtaagcgaaaatttctagtcccattctgatcactcggtgaagttggcatacagcctcaatccgatagggatagtagatccactggttcanctatgaccaagcaatacgccgaagacccacatgtagaagcatgtgatgaggtgccgaacgattggcttgagtaagatcagccatgcggtaggctttgtgccttgcgaagncaaagtcatcactncaggcggcgattgtgagtcactcggccttaccctatttcagctcttatatcccaaagagcgcaagaatcaaagtaattttaccacagagactaccatgttgctgagagatttggacaagcaagcaatcaagaatacccggttggctcctactatgcctcggcaacgacggatcatatttcaaccaatcccggatcgaagtgacggcaattgccttttgggaagtggtgtcccaagttaatgcaaccaaccatgttctgctgataagagaacagtccactcccgggagctggagatcctctgggaaccatgacttgactcatagaagtgactaagagcttaggagccatgttatggactctgggatcatattcgatcccagaaaagtgagggtcccacccgcgagataaagagtggctctggtatgggtagttaatcaatattagaatgcaaatcaaaacgcgggctaagtgcaaagacaccagttgaagagacatgatgttgatgaacaataaataacatgcagccaacgattatttgggagttgaaaggtaacgacgccttccaccataatcagtacagtagaataacgagaataaacacatagtctgtaagatatcgacgagtagtacacggcccatagtggtgagaaactagggccaacggcaagcaaacttgcagctgttgattnaacgatcggttgttagaaatgtgagggttgaaacaagattaaataattcattttctttctaaataactgaaagaagtagggcgttnattgaatatcattggctagacaaccgtctccactccaatcagcgcattttcctaatacctagacaccccccctcccccttcacccaaacacaccgcccagcaccgggggaggaagccatgagtacttaaaatgtatgaccggctttaattattaaccggagttaatgcgagatagttccggtatacctggaatatagctgcttccatgtaggtaattccttgcttctgcttggttggggagaccaacaatcgtcagccttgggtgatgacgttacgtcgtttgaaaatccctgtaacacacacaacaaggtatagggggtaggggggttattttcgcatgcgacatacgtaattttatgtcactncggtcctggattttggtgggcacaatgacactgataaacaacgacactgattctgattccgcattgtaacttaagttgaattttctaactacgtcgcaacgaaatcttcaacctatcgctacgatgcctgaaccaattgccataaacagtacaaaaatctgtgagaggaaaccgcgcatcaaggctgcagaagcgaacaacgagaccgtgataattgcngagaagagtggtatcaccagcaagcggctccccgcagtctccctcgccgacgccatagaaaaccctggtgttgcgcgagcgaacgcagcggtgtccgtggaaaaacctgaaggcgaccttgaatgggccagaaaatgtgacggttatgtatgtcttcgagaatcgtgctgtcttcaaggcctatcgctattattctgatgctaacgatatgcagtcgcctcttcagcagcacatccttttctgggatcgcgatcgcgacgggatgatcttcccatgggatacttacaacgggtttcgtgagctaggtttcaacgttatcttctcgataattgcgaccttcatcatcaacgtgaacttctcctaccccacacacatggcatactcatggtgccccgacccatggttccgtgttcatattacaagcatacataaggccaaagtcagtacttgcaacattgctgcatattggaggcgatggtgaagctgatccacctcttagcacggttcggacagcggcatctacgacccagagggccgcttcataccgcaactcttcgaggatttgttctcgaaatgggataaagatggcgatggagctttgacacttcgggagcttttccagctaatgcacggccatcgatgcgccgctgatccttttggggtaggtcttttatcttggtagtaagtgttactttaacattaacgactgcgtagtggggtgcagccttttttgaatggggaacgacttggattcttatccagaaagacaacaaagtcaatagggaggatctacgggcggtatacgatgtatagaaacccatttcaactacggggttgttacagcacggctaacgtttgctagggctcgttgttctggaaagttcgcgaagcaaggaagacaccaactggctggacgcagggctggggcttaggaggcgatgggtttatcggagggacaaaggtgttctaatagtcgttgaggaattcttttcgtagcctcaagtagtggatggctacagggatcgttgtaattttcttactagctaacgaaccaggccacaatcccaggcgctttcgagaacaagaaggaacgtatacactttgtggtattgtagaattcgaatacagattaccccttgaacactcacgctttctttccaagcgccccactcatggtgcgctaaacctgatttggccaaagaaagtccccactataatgaatcatatctcgcaacgccacagacgtcacatccaacgactcctgtggattcgagtttttcccgtctccttcatcgaattaggtttacacgttaacaacacagtatctagctttaggtatgtgctctgtgacaaatttcgtttctacgactattatcatttcatgctccctgctgtacagtcaaatcatctcgcctgaagcatacaaagtcggtcaaaacaatcgttgtgcaccgtacccatattatttcgacaacattgccaggagctctatcccataacgacatgcaaatagtcagctcaaccatcaacacactccaacacatatataatcgcgacatgaggacgtatactcaatcccagataaaatctcttcctggtctgaatgaaacaactggaaccagcaacagcgactctgatgatgtccctgccaccggtgtgctgctctatcaaaatcctggcactccctgctgctaaaatttgcagaattatactcgcacaatgcggttgtatacatggcgtcagatcctatctttctggtctcaatgaaaacgatgaagcgacaacgcatcttcgtcctgagtttattgagtcgtgaaacttaatttcggtcatctattcatataaattctgcgtaacttctttctggatatggcccggctgcatgtccaaaaatgagatattactctcatggttgatatggtgacgataacaggacagacgccgagaacggagggcagatacgtgagagtatgggcgtttactatcagatatggtaacatttccttagaacatagtttgttacatccaaacatagattagaatagtattgggtaaggtttgagaagcaaaatgtaaacgtagtgtgagtgaactcttatcgaatcctcatgttggccatggggcgggcgtttcggtgagtatagtctgcccaatgccggaaaatgtgagtacggtaaatttgtcggtctactaggaatacattcagaaaacaccgtaggaacctttcccggccgaatcaagtttagcactttagcacaccgccatctgttatggagctattcaatctgaaaccaaggccacactcggctcagctactcagtatatacggacgaaacagcacttctctcaaggttctgcttgacaaagctatctgacaatgcaagccacctctagtccaaaaacaaaagtaagtagattgctcaagaaggagactatgcacgatttggaccttagcctagcgcgtttttgcttttcctgcggataacatggccccacttgaagaagaggtacgggacaggtaccatgatcactgaaagggttcctagcagaaccagcgaccacctcacgcccaagttttcatacagcggtagggacgccaacaccatgccgcctgacgataggcagcggaggaggttcacactggcgagggcagatgccgaccaaatgccgtaggagtcgataaggtattgatacagtagtagtagtagtagtagtagtagtagtagtagtagtagtagtagatttcatttacaccgacctctcgcaagaagcgatatgcggtctacctcaactatatatctccgcctatgtacatgtagagtgatccacttcctgaaaacgaacttagagccccgtcaaggcctatcgtggccacattgccgctcccattgttaggctgcccttatggcgcacggctgcgaaaccgctgtgacgcctcggcgaagtccagcacagcctggactgttttggctcgcgacacggtgtctggtttacctttctcaccttcgtttgagcctcccagcagactcgacacgctgttgaacgcgtccccaacttgtcttcttaattcccgccgcagttctcgcagatttgggcagtcgaccaacacgtggcccaccgtctcatgcgcaccgcactcacattgatcatcatcacggaagttgaatttcttcgtgtgagtggctaaccagttgtggcccgtgcgaagctgagtgagcaaatacgctcggttcctgggtaaattcccgtatagtttcctggtgtacctcgccggtagggtgccgtcgatcttccgtaagtgagcgcctttggtgcttgacttccactcttgctcccactgagcatgtatcttgccgcggataaatgcgctctccctcgtcagcagcggccggaagggatgggtttgacccggttgcgcggcctccttggccaatcggtccgcagcatcattccccgggttgtcacagtgtcctggcatccattggaggcgaagcgtaacgttgcgtccctggacctcggtggcagtttgaaggaacgcgtggacgattcgttgtccagatttgttcttcgcattctggatcgcttgtaaggcggatcggctgtcacataggattgttgctgttgtgtttcctctgtctacgtcgattgagcgttggtgagccaacttgaacaccatgttgacagcgtagaagatgcctatgagctctgccatgtgaaccgaccagcgttccgtcggccccacctggacattttcggattctatcgcctctttattgtcgttgagtgcaacaatagcggcccccagatgaccctcgcgtccggacgcgtgtgagtagacgacgatgttagcatgggaccgtaccgtctccgcccgctcttttgcgatttctcggtttggctcaatttcaatctcctcgaacgcttcggcgagccatggtggtaacggtctcgggtcgatcgtctccagtgccatcaacctggtcgggtccatagtcttaagagtttccgcgaggggaaaccggaaacgtgaccttatattgtccctgcgtctctgggctcgtgatagtgcactccagattggatgatcacgaggcaaagtgtgcagctttgcgatggtacgctgggctcggtggcggagacgaaggtgtgtgggaagtacgtgggcttccacctctagggtcgtggtagcgactgttctgaatgccgatagtattcggatcagtgaagttctctgcactgcgttcaggtgtctaaaaaggcgctccgtgcaaaacctcaatcaaattccaggataccaagataggccatcagaagctgaacattctcgccagagagccgttcgacatttcaactctgcaatctaagctctgcggtattgctaaagaatttctttgcgcgagatggcaccggcaacggcaggccgaccaagttggccagcagtggtatgaagccgccgtccgcaaccaggtgcgagaaccacatggcttcagaatagcttctgcatcagtcgtggaagatctgggccagcatcagacgtcttcagcctccaggcgacgccccacgttggacaacactgacgggtcaactcaccagctcagacaagacccgccgttgcgccagtcaaccagccccgagccagtgcagccatccactccatttgtgactgccacaatgctgcgaacgaatagtgttccatggagcgtttcgccggaccaacccgccatcctgtcatcggcaagtaatgtctaggctggtgtccaagacttaacgctgcagagtttcaggccgagccaagaggttgacatccacgtcgatagcatttattgtgtgttctgcctgcccgacgatgaagaccatgcgaacgagcgcgtgatcttgcgctgccgtgagtgcacatcgtgctgtcatctctcctgcgcagaagaatggttgggaaaggcgagttgcaggttttagcacatcatactgcgtgtggtaagtgtcgatggccttatttctcgacgaccaagatactgatgaccacagtcgaaacgaaggagccctagatgccttcctccgccttttaggaagccccgcgtcggatgccgagactggttccgtccccacggcaagcgaatcgtctcccaccagtcggccccgtcgctcggccagactcgcagggccccatccaccacgagacccgtccacctctgcaccgcttcgccggtcggcacgactctccactcagcgtgggtgatcacaatttgatgagaataccgctccgcacgaatcgaatcgaatcggacttttggcagattcgattcgattcgaattaatattgaaaataaagattcgtacgaattcgaattcaagaccgattcggattcgattcgaagttcgcaaactcctttgttttaaagcttcattgggatggcggtcaatcacgcctgttgttcaaagcgatagccagaaatcaacacctcatacagtcagactaataattaattaaataatagttagttagatacagagaaaagtagactagattcaggctgatatcaaaattgaacaatctggccttaagattaagacgctgtagggcagtatcaatagatgcaatttttggagctagcatcttcaattggcgcttataataccggcgcctccacggtcacgtagtatgtttctttcaagacatcgggggctccgcagcaggaatgcgatactacttacacttctgaggcggtggtgaaggatagtttcgagctcagctggaggctgggaagaaatttactgatatcgtgatggatttctgtttcacatggccaggaattttgcgttgccgcctacccttataccctgcgtgaggcgcgaggtgggaactgttaggacccctgaaagtctctttcatcattggactatctttaatatgcttggatatatataggatgtggctggacgctcggcacggaatatgttgtttaccacttgtaacgaggttaatgagtcgtccacctgttactactgccgttctgctcttcagccatgttcacgagctcgctcccttggtagtcacttagttcccttcgttatgtgccaactttctcggattaagcgttggttttgccccggatatcgatgctgttggaaatagaaatatttacattttgaagtagagattccatcctggtactacggtgccatctgttatctgtttctcctgcattgttataatttgcgcagagaaggaaggcaacatgggctgtatcggctacgcatacgtagctgtcagaagaagttggaagtccgagaaggatacgggagtctatttccgctgggtgttggggctttctgttgtgctggctgttgtttggcttgtacgcggtgtttagcagtatatgttacctagatcgttaattatctgcgcgacagataggtcgtgatcatgaaacttagtagctagatacgtttataggttaagtaggtaactacgaagttctatgaaaatcgagcttagaatgcgtgaacgacagatcaaatgccgaccgaagataggcccactttctctgacaaaccatatccaccaaaatgtaagtaacgtgttgtcatcccgacttaggatgagtcggcaactcccacttgggataggacgttgcggttgatacaattgcggtatgcatttattgtgttgtgtaccgagcgggaaggatggcggacccacatgcgggtgcacccgggccacctcgcacaaccacacgaggaacgacaagcacgagagagtgagtcacttatcaaatgttccgacttgttcgttctccgctcccatcgagcaaccaatggtcgcttcaaatgtttcggtgagacctcggcgttcccactcgattggcgctagcgccatatcgctccgcgtctttctccctttcttctgggtcactcacccgatgtctgcgataatcccagaccctcttccgccactccggacagggatttctccaagttttgagccataccaaatttctgtcatttccttttccgggtcaaagttctttcggcattcttctcgggacagacaacaggaaaatggaaacgaaaatccggataaatcctacttacacactcgcacatcgtcttgagctcgcattaattacaatggtgctgttttgacattcctggcaaggatacgacccaaggaaatgtaaaattcaatacttcaactcttatactgtttcgcggatggccttgcgagtacgcgcagttttagagaggtcatgagcgcgatggcagaggtacaacggtccctcccggcccagcgctatgctgagacaacagaaacataagtgacctcgtaaccacaaggttattcctagtctaacaaacattcttacgtcttctacttccggggggccccatctctacgcgttcacagataggaagaatagaaaaataaatgggatgtttatggtgatagtagggggcctcatcttgttcttttctttctgggtccccggaaaacacccagggtgacattcactatgagacacgctccacttcgatcaaaaaggatggagccttgctggtccttcaattcagtattttgattgaagtggagcgtatcccaaagcgaatgtcactctgggtgtttcccgaggattcagagagggaagaacaagatgaggttcgttctttctgtaagttttcaccacccacgctctcgtcattttcaagatttgattcagtcttctcaacctaatatttatttcaaaccaatttggcgagccagcaattacaaagatcatgctgcctatactacttgctgttattcccgccttgttagcgggcactactgctgctgccgccgtggcgcctcgcgatcgcacttgtactgtcgaattctttcagaagcgaggtcaggtacttgaacggaccagcctatctctgacctgcggttcattggcttttgatagaaccccgttgttggcggcgaaaactcactgacttgtggtgtgtcccgtgactacggtgacggccgaaatgatgtcctctcttcagaattcaataagatctggcacgcaggtgatcattgctacagttcacagttaccgtactccatctggtaatgctcctttcaatcattcctatccatgtccggacgagatgttaatatgctggctcttactcaaagtatccacacaagcagtagtactgacggctatctggactatggtgatcaacacaaggattttaacgaggatggctgcaagcaggaccattcggcaaaccctacgggcgatgaacataccatttcatgtacctttgcatgtgcctagataagtgggcacactactccagagaattgaccgaggcaagggcgccattttcggccaaacttctaccgtccacgatactacgcccaaatgggtatttacggtaacgtggtcatgcaggtagtagatcggtagatgttcgaaaattagaattcgccaaggcggttctactactctaacatatacttatctacataggaaggacacagggatatataaggacactcattcatatacttagtttagttcttcgtctccaatcatacatcgttactagtgtttaccttttacttgattataacttggcaacacgtacgaatagaccaacatccggcgtagtcctatccggtgctcttcctggcatcgttactcaatagttcagacggatctatcctgcagtaaggcctgttaggcaacagtacggctgagaggacagatcgtctacgttgtaggactgaggagtataaggcaagtatagcccacccttctaacctaactgtgaccagtttgcggtgcataacgcggggttcgtaggccccctctcgtccactctgtttgcctacagtcccggggcgcctggatccctcctaattctgacaataattagtcttggcatatgcaggcaatacgcggcatccccttcaacgtcatcgtatcttacccggttgacaggccatacgcctggaaactgtatatctttataactaatcagacgggggaaagaagcaaaaggaggttcctacgcgtacgtattcgctatttgctactagtggttcactaaacctattactcgcactaaatgtattggtgccgatagttagcgaggttatgctaccttggttcctacctttgtaacgggccagtgcccggtgggcatcacgtgcgtaaacatgatctttcaccagcacaccccttgttgtatacgttcgatcccgccaactctctctcctttccttaatgttacgcgctgctagccacagttagtttataaaggtctagggcaatacttgtcttatgccactcagtcttccaacgtcaacgatctattctctcaacggtactgttgcctaacaggccttactgcaggatagatccgtttgaactattgagtaacgatgccagaagagcaccggataggactacgccggatgttggtctattcgtacgtgttgccaagttataatcaagtaaaaggtaaacactagtaacaatgtataattgaagacgtagaactaaactgagtgcaccaatgagtgtccccatatatgcttcgttgctactcccccggtcgaccgcctaagctacccccagggtaggtccaagagtatcttctgggagtagcttccctggtcacgtatatttgcgacctccaaagtggtaacacttgaagtctctgttatccatcatcctgaagcatatatgtaccggccgacctttgataatggatctcatcagggcggatcatgctcctgctcactgagcatgatgatggtttctctttcccctgaatacccggggatgccggagtagaggttgttgcacgtgacttgacgacagatggattggttggtgtagatgtggggtcaatattaattattaatgcgcgcacaacgtggtgtacggaacaccgattaccgcaccagtagcttgatttttggcttttttcttggtggtaggctgtaatatcctttgaaggttcatccttgaaaagctcaatcgcgcacaaagttgattggtggaagaaaaactcggggctgtgaaacagacccaccccgacaacgcgggtagggctacgaagacgattatgtccgtccccattacaagtgcattacagtggctgtttgtctttacgtttagcggattccggggtcgcattcgtggcggggcgatggtgccatcacttggcgccaagatcttttagctccctgccgcgagatattacacataggtagttcctaagaatatcttgaatgtacaagatttagccccaattataatctcccgcaagctcatctcgtttcgaaatcaactattacattacgccttatctggctgaactaaagctatgtttgaaaaatcgaaaaagaccgatctgcggtcatcctcaactcttgaaaagcggggaaaccacctaccagatcctgcattgaaatggggaatcactccttccaagccatatgatcccaatgaaaaacctgggcccgaccatccagttcatcaaatccctctcgagaaacaggaaaagatgcgaaaaaaaggaatcaaccctgtactcaaagctgaaattgatcgggcccacaaaggagaaggtggcttttggagtgaagttcggcaaacttctttcggtggtggatggatcaaataaggtatgattcggtggcattaagaacctcgatgacaagctttcctaaaatatgtctaatgaatgaagcaggcgatccaccactagaaccgagcagatcataggaaacgtagagggtgtttacaggcgcttgagtgattttgtccgttggatctcccgccttcgctgctcatcgtcttggggtctttagtgcaggtggagatgcagattgagtcaagaatacagtacagtgtattctacgatgatccagtttggttccatttccgatttggttgaatttcagtgattaatagttgtgctgtgaaacttgaaaacaatgaagatattgtgattgcaatatcagactacatatatggccttaaagtatggcgttctggggtgcgtcactcgcttacatgcacgcgtcattcgtttgtcacttagtaagtacataggttaggttattttcagatagcttagtaaaagcggtgtcttatatgttgccgtcaaatgaggccacaccggccggacctccccctcacatcatacgctcactcagtaatgatgtggatggcacggctactgtcaccagcttcccctcgaaacactggaatggcagtttttatggtaataattttcgtgacatcaagtctattgcttcgagatcaacaaccgccgttcgacagtacctactcccttcatgaaaccgacatcttcgtcaacctgttgacaatatcgcgttgcaggtagctcaggtcgtcgtcgcagcacttttcagcagattaccaatctcacacaagcatataagtcatacaactttaacgccagtgttggctatgctcttgcatcctcagttcgcactgatgatttgacctggttactggaacactgcaaggaatcgtgagtcaatgacgaatccgtaaccttcaatggctgaccgaagcccagaggccacatacctttcgtctatagcagcgaggaccgtgtcgagtatggacttctcacacctcgtacacgtcgtgggcgagagtcatcagcctatctttcgtacattgtggacttctaccactatctaccagattattcaatcttcatccacgcatctcctgagcaatggcacaatgacctttttgggcctttgacccttgatacgctgaaaaaccttcgactggagtctgtcgccgtcaacggatacgtcaaactccgctgctaacataaccctggatgcccaaccggcatctacccccttacgccgtcgcaagtggacattgaagctcacgacattcgcgcttacttttcagaggcgtaccagcaggttctaggagtaaaagcagaggaagtgccagtggagataggaaacgtgtgctgtggacagtttgccgtaagccgcgatagaattctagcacggcccagggaggattacaagcggatattgagatgggtggccgaaacggatttgactgacaatttcggcgtgggctgggtgctcgaaaaactgtggcacatcatattcggaatggacgccgtttagtaagtctgccttggcttctaccttttctgtgacgtacattctggcatcccgttgggtctcctattaactgtatggactatagccgccctcgctatgagcaatgccgctgcgacgcctatggatggtgtggtccttaagcaacaggtgaggtgttgcacccagtcatgaggtccgacgtttaaacaggttctggtttgaaactttcatatctgtcaataggcttcatttaggggagcgtacagtacacctgagatagatcactgtgccacttggaaacaaatttcgaatattactgtagtactgggacacatactgtactgggacacatactgtactgggacacatactgtactgggacacatactgtactgggacacatactgtactgggacacacatactgtacagggcgggatcactttatcacggaggtacgctaagggagacaactacaggcgcgacgggccggcgacgggccgacaaacagagcattgcgatataacattattgtgttgtgtgccgagcaggagctaacaccaaacgaatggcggacccacccagggggggctcccgagccccttgccaccacgcacgcgcgaagagacacatggatcgacgggtcggaaaacctcaccaacgaccacggttcggattaggagacatgcacgaatcgaaagtgagcagacccacgcggctccggatcgcttggagctgaccaatacggaatcaacactggacgagtgacaaccagagaggtttggcagatcatgtacacctgcaacgcaccattgaagagcaaatcacgcttattcacaccaccaagatcgaactgagagaagtgagagataaccagaacgcgctacaaagctatctgctagagttatcagactggcgatcgaattgggcatatggagaggaattgtcgggctcgaagagagtataaccagtttaatcatcatgggaaagcttggtgcaggagaagatacgtagcttcagaacgttctacagaccagatagacaaagttcagcttgccacttaacaggggaatttactttctcatgactgcgaccaagagaacacaaccacggatcgggttttagcctaccattgtgtcgccaaagtctgcgtgttattccaaatactcacctaccccagcagtacctcctaagcaaaaaagccccgtttcatcagacactgacggcggtcaactttgggcttgtggatcgtgtctggatttgcaaatccttctaattcctctccgggccacaaatagaacctccttgatctaccgccccgtgggtcgtcgctgggatctgcatcgcagaaccgtacctgcgtctgtctaaatgcacgcgtggtgtttgattagtccgcccggttctatttgtgtccaggttctcatcagtgtgtaatagtagcgttgcaggatgattcagcgtctacccagcctcaaccctctgtttgtatggtaagttgagtctatttggaataccggcgtcgtaacatccaatagtaactaacctttgaagctatgagctacccgaacgctgaatgtacggctcgcatccggacggtgacgtatccagtacgcaatcgatgaacaatcaattcgaattgcttaggtaaaaaagcctgttgtcatcccattcagtgctccgatcagtaattacttcgtttcaaattgatcgatgttaatcgctcagacccggtctcgatattttctcgtctcgataagaggccaaacagcaaaagccaattgtgcaagtctccacatctggagtcagaacaaccaacgaagaccattttgcacaggctacgctacctacgacatcttggtttggatgcaagccatctgacaacttcagtcagccatttcgcccagcggcgaaacacaaaagtatggatgcgcagggatacgaaacacgcgactccattaacaatgtctggggcgctcgtacaccatataagcatgagtggccaagccgatgcgacgcccatattatcaaaccgcccgaaaaatgggtccaaagcgcctgtgtgctttgtaggtatgtagttgctcaagacggctgtgacagaccatatatggttcacccgatgactgaccaaagttttcagcaatggatgcggaatggatatcggcgtgagagatggcaaagtcactggggtgcgtggtcgtgtttcggaccgcgtgaataagggacgactaggtccaaagggcttgcacgggtgagtcatcaacgaggattatccaacgggagaaatgacttattcaggacctgatacagatgggcctcaatcaaccacgccgaccgccttaaatatccgctgattcgccgaaacggcaaactcgaacgggcaacatgggatgaggtcatgtcactgattgttgacaaggcgcacgaggttcaatctcgcctatcgaatcatggcattggcttttacacctcggggcaactgtttctggaagaatactacgtccttgctatggtaggcaaggcaggtctcaatacgctgcacatgtacgacaccgcgagccggcagtgcaatggtgccttgaaaagctgacactttaagcagggacggcaatactcgtttatgcactgcaacggccgcagctagcatgcgcgaatcctttggtagtgatggccaaccgggatcctacggtgacatcgattatacggactgcctcttcctggtaggccacaacatggcgcacactcaaacggtcttatggtcccgcgttctagatcggctacaaggacctcaaccgcccaaactcattgtcgtggatccaagaaggtcagatacagcaaagcaggcgactgtgcatctggcaccgaagagcgggacaaatgttgctttactcaacggcctgcagtatctgctgtttaccaatgggtggatcaacgaagactatgtttcaaagcatgttgtcgggctcgaaaatctccgtacggttgtggaccggtatacacccgacatcgtggaaagaatcacaggcgtccccgtctcgcagctccaccaggccacagagataattggaaccgctgccagtctcctgtccactgccctacagggagtgtaccagtcgaaccaggcgactgccgctgcttgccagatcaacaacatcaacctgctccgtggcctgataggtaaacctggaagcggcattcttcagatgaacggacaacccactgcccaaaataatcgggaagctggatgcgacggcgagtatcctgggttccgaaacttccagaaccctaggcacatccaagaaattgccgatatatggaacattgagccaatcaaggtccctcactggaatcaacccacgcacgttgaaaatatgctcaaatatatcagcgagggttctatcaaaatgttctgggtttctggcaccaatcctctcgtcagtctgccgcacctacagaaggttcgggagttattgaccaaaccggaattgttcgtggtgacccaagacattttcttgactgaaactgctgccatctcagacgtggttcttcctgctgcgcagtggggagagaaaacaggttgctttaccaacgttgaccggaccgtgcatttatcccagaaagcggtcgaatcgccaggccagagcaaagccgacatggacatatggctagatttcgcgaagcggatggactttcgtgataaagatgggaagccactaatcccgtttaccagccccgaagaggttttcaatgcatggaggaagatgtctcatggccgcccattggactgcaccgagatgacttaccagaagttgtctggtggttcgggcattcaatggccgtgcaccagcgtataccctcagggcaaggaacgtttatttgacgacgccaaattcttcaccgatacggaatactgtgaatcctacgggcacgatctcgaaacaggtgcacctttcacaaaatcgcaatatcaagcgatgaatcctgcagggcgagccatcctcaaagcggcccactacaaatcgccgtttgaagaaatcaatgaacaataccctctgcgactcacaactggccgcaatgtctaccaatttcatacacgtacaaagactggccgctctaagcggttgcaggaggcataccccgaacctgtcattcagatctctaatacagatgcagacagcctgcatctcgtggatggagaaatggtcgtggtcaaatcgcgacgcggcagtcttgaattaccagttgctataggtgacataagtgagggccacgtcttcattccgtttcattttggctactttgatgccacggatgacagggcacgcgcagcaaatgagttaacgcacggtaaagacgcagagttctcaatcgtccatcgaatcctcgattactgattaatcacagagcaatgggaccctgtctcgaagcaacctatgttcaaatccggagctgttcgtatagagaaatgtgtccagatagagggagggaaggccaatcacgctgaagaaaagcacactgaagctgtccgaagagtcgagaggggcaaagaaagggcagagcctgctgctgaaaaaggaggtcagatgggcaacaaggaatccgtgcgacggctcgaattgtggatgggagcgacaaacgagggccttgagatactacttgaaatctacagggacttgatacctcgtttagtccacgatttggaggttcagggtgggctggaggtaatgcgtcgcctatctacagaggttttgcatgagttcaaaccggtgattgatagatatcacggaagtcgtcaatacggtcgaagagttgcccagtatctgcgaaaagctgtctttccagcagtcgaggaaaccaaggacccgtatgaggcactagcagctctgcaatcgctggatctcttcttaacctatatagaaggtcacctcacagcattatcgcctgctagtcaagctgtgtgggatagcgagtttgtgaacgctatttccttcgcacaaggcagcatccaaagacaaagggcgtgggttaatcagcatataaaggtcaaaagcccacagacacttctagttccaacagtcgctgcgaaagatctttacgacaaccagtcgagtatggcaggacgaatacgatcttaggtcgagcccattccgcatgacaacgtattgatacccaaatatactacgaagcacagtaccaagtgaaaaaccgcatgaacctctcccagagcctagggtgcgaaaggttgattgaataaattaggaaggagcgaattgatgagctaggtaaactgcatgttagatgattacgggagatatcaaaaataatgaaatgctccatcaaatatagataatatggaagaaagtaccctgcacttaagctcgtttccaaccagttagtatacattggatccccccatcaatagaaacatggtttcaagaatggtatcactaggtgcaaaaataagtttacacatatcgtatcagcgtcaagcaccgcaaattgacaccgatatagggatattcgcgttccccaactatttaagttatcgattgcttccttcactgtagctgaacttgggaggccgttagcccccccgacaaaacaacaatatatctggaatctatacatcaacaatctacacggttcctaggtattatatatatatatgcttatctgcatattgttgctgaattacctttactaggcggtccgatgatggtggtaggtgtcggctgtcttgcaaaaaatatcaaccagtcctggaccccgatacctcgaagtcgtcgacagtgtcatccccaacctgcaccagatgtggtggttatagacagtggctgtattatgaatgaaaaccctcgaatttgtacggtcattcgatacgtcgagggtcaccgtcagtggctgagacaggaggtccaaacaagaacacttttaagtcgaatggacaccacggcgccgaaatgaccgcagaaggccttacggccagattcgataagatatgtggctgatgtagatcaggaacgtacagtgacgcagcaaaaaatctaacacccctaaccccacacccccttgattacataattttctgccagtacaaaagctccatgaattcatactataaatctagtatggtgtataccacccccggctctcaataatagcctctacccggtgcggcatcgtctcagagagatgcttcatataatccagattcgatctttcccatgcttgctacgcagtctcgactaaaatagcctttgttatatcattattccttatatgaataagatcaggccgaagcttatagatttctgttgcgatatgaggctggtgcagatcaggaaccaagccgcactgtcggaattagctccgaagtgtctatacagacgaccaagttgatttccaatcaacttggctaactgttgtatatataggctcatgtatccctctgaaataataagacaattcatacctctgaactacaacaggttatgagcccgggagcaaacactcgggtgccgtttctactcatctgagaatcatcttgaccatcttgattatagatctaccccgctttcattatcctcactatgtctgctctggtccatgactcgcccgaccgagcggtcacggccattgagcctctgacaggcagcgacaatttcgcaacctggaaacgtctcatgacctcctacctcaaagcaaggcaggtctgggatgtagtgtcgggcggccttcagcgtcccgattgtctattcaagtacgccaaacccattacggcggatatccaccccttggtggagccccacctcaacggggcggtgaggcagcgagccattgaagcgcgcctcgaagtggaggtccaggcgttcgagcgccaccgtgaatggtcgcgtcgcgaagccgaggcctaccatactattttccggtacctgtccccccacattagcattcatgtcgcgggactcgagacgtcccgtgacctctggaatgaactcgaagaacgatatcggcggatggaactcgccacgttctgcgagctgttcgcccagcttcgcgaaaccactggcgagcgctgcggcagtgcgcgcgaattcgttgaccgtgtacggttgctggtacatcgattgaatgccatcgcgcccgggtcgatcggcgatcgagcacacatcgcgatcctgctcacgcagatcggaccagaatatgtcctgattgtagatgccattcagaatgacaaggatccagtgaatccgaccacgatcggaaaccgtctgtctaatgccgaacagacggtccggagaaaagagtctccaacgcccttgcaggcagcatctggaccgtccatcaatacggtgcagcagactgccaagaaatgcaactattgcaaggagcgcggccatgtggtcgcgcagtgctggaagaaacagcgagaagcacagccgtccagggaccatgccctgaaggctgaacggagtgtttccggctcaccaagaaataacttgcaaaatataccatcaagccaggtgggagatcggcagggcccgccgacttccaagagaccgaggatcaatatcgtgagggcgagggtgacgaccctttatacccacgcaccgcaaccccggtggattctggactcggccgccaccagccacatctgctgggaccggagctgcttcagcagtctgcggccccaccgcgagatgctggacacggcgggcgatccagtggaagccgaagggattggtacggtgaagctcacgctccgggggaagttcaaccaacccctggtgttgaagaatgtgtacttcgcgccacgcgtcgggatgaacctgatcagtgtaccgaagttattgcgagaccgctactcggtggtggcgcacccacagaatgtcttcgtgcaacgccgaggacggaccgtggggaccgcctaccatgcggaggaggatctactgatcctgcggtgccatgtgagcagaagatctcgagagcgagtccaactggcgagggcgccgacgacccacggccatgcagattcactggaaccgcaggcggtggccatggacgtcgacgaccctcaggagtcaagtgacgcagaatgcgcaacgtcaacctctgaactcggtggtgaagctgtgatactcgaagaagatgcgtgcaaaggagtggaccaggcctccgaagcgttgtggcacgctcggatgggacatctgaaccggggagacttgagggtggtcctccggcagaccggcactccgtaccgaccgctaacgcaggcgcagctgctggcaacgccgcagtgcccagcgtgtatgtcgggtaagcagcatcagaagagaaactcccgtgcaagacggccacgtctgcattcaacgggaatttttgaaatgatccattcggacatcatggagatgccgattgccaaagatggctccaggtacgtgatcacctttactgacgattattctcgtggctcgtgggcatatgccatgagatggaagcatgaagcgctgcggaagttccgacaatttgaggcctgggtgcaccgacagttcggcgcccagatcaagaggttcctcaccgacaatgggagagaatacttgcccgtcggaacacacctcgagtcccagggagtcgagtttgtcacctcgccgccatgactgcaaagggcagaatggactggcggaacgcacgaatcgcactatccgggagcggatcaacacgctcttgtctgatgcgaaccttcctccttcctggtggaccgagcttgtggatacggtggtctatctgaagctgcgcgcgccagcatcaattttgcggaagaagacgccgtttgaaattttacacgggaagccgcctcagctgtcgcatctacgacgcattggctcccgtgcctgggtattgatcccgaaagagcatcgagcaaaactcgggccgagatcatccgagtgtcgactgctaggctattgtgaaccgaaccagtacaagctctatgagatacattctggaaagacagtcttttcccgtgatgtcgagttcgatgagtggcgccaccggggggaaacaggcaacgacctcccggacaacgctcctccatcacctgtctttccatcaatgccaagttcagccagagggctgctaacaccaccggcatcgccagtacctccggcgagtgagcgagagaaaacaccacctgggcgtgaagaggagacacttccagtagtgaatccaagccaacaaggaaatgacttgacatcggatcttgggtattcgatctatggtcgcagacgaagaccgtcgcggcgactcctggagtcactaggcaaggtgtacttggcaggcacattgaataccgcaccggccagacaagtcgacccggcgaccttccacgaggccgtgtcaggcccaacccagctggaatggtgggccgccatccagaaagaatatgcgtcgcttctcgaacacggaacatgggaaaaggttcggcgagaggacgtcccagccggagatcatgtgattggctgtaaatgggtcttcaggaccaaagccaacggaacgcgcaaggcgcgattggtcatcaaaggttgccggcagaaacatggcatcgactatcacgaaacgtttgctgctgtgtcgcgaatggactccgtccgctgcattgtagccagcgccgtgttgcgcggatggaaactccaccaattcgatgctgtcaccgcatttctccatggggacgtcgattcgtctatttatatggaattgcccgaaggcttcgaagagccagggtacgtatgccggctgcgccgctcactgtacgggctgaagcaggctccgcggatttggtaccaatgcgtccaccgcgtgcgactttttggtgccgaagaccggtctccccatttcgactgatgttcaaccatggcactacttcggagatatgtggcattggcattcctcgagagtatagtattgccacacctagctgacccggcaaaaccgctggctctgaggaatacataattagtcgaaaacgccattgggactgagttcccagagaggagcacaaacccgatagacacgtattctgttttcggggtatttaatatagcctcgatggccatgaagctgtgctgtggcgatgggtggctgtttctgttttgctcattcatgttgttatggtatgagttcctctagcagtttgggaagaaaggaaatgaagaaaacactacaggtgtgaaaaatgaacctggagaataaccaacaacgtagtatcaacgcatagtatagataggttaaacggcttttagaccgagtaaactcaacataagaaggggtgatatcctgcgagctaacatttctgattgtgttgacagttatcgacctgggaatttggcgtattgactctcgacatgcccaattgtatcaaaattgattgaagtgtgagggcccgtcaaggggccttcaggggtaatcctccaatgttaacaatccgactgacaataccatgctatgggaaaaatgggcggaagatgaataagccagtcatgaagaatccacagtggtatcctaaagttggcaatattctccaaccccttatattttgccgactaggcatgggtacactaccgtgaattctttactcatacttggttattcagtacccgacattgcgatatgtggcgaggtcctggtgggataaatacagtggtcctggtcaaccagctcgaaacatccctgtagtccgtgctctggattgctaacagcaaggaaacctttaaaattactgaatcactagcattttatcaaatgttcaagggtatattaagggttccacttatattcatgtctcgccatacaacccgacagcgtcttttggacaatttcgacatacaacgtgctaagttcaaagaagagcttatagctatatgctgaacagtcgctctatttcttgtgttgtagtttatagggattatcttaattgttcttccagaggaaatacgtgaggctatatataccgcatgagctccaggttgattagaaatcaacctgcttgtttgtatagacacatcaggaattaattccgatggtgcggctttgttcctgatctgaaccagcttcatatcacaacatatcagcacaagtcatcgggataccgtgctatatgaacagcatcgcttactgccggctctgttgtggacatgtttgagtttaaaggcgtggaagcctagtaaatttttagcatgtctcgaactcggacggcaaaagcaagggccataccactggagtcgcaaccagcaggacgctcagagtgagatcccagcgcaatcatattatttgttcggaaaagctagaagcaccgtgaaagcgaagaagaacagtccgctgttacatatccggcgcttccagggtaatctaacgaaacatgtaaggtggtgtttgcggaacgagagagctaccaaccgctgtgaactcacagtctaaagttgattagcccgcatcggtgtgatgttatcgcctacttaaaaacatgagaaattcatgctacccactgaaacagtctcctcaactttatgagtggctcattcgacaagttcctcacatgcatgcaacaatatatatatttgggcatttgtcagctcgcacgctccatgtcattttactgaatttcaagcttatttaagaaaacgaccaaagcgctgaaatttacagctccgattaccccatggcccataattatatgagggtatgttggacatacaagaatcggcaaccgcagtggctatttatctaaccattttgggcaggggtgacggaaagcataagctcattgcattacccgcattttcagttgactctgagcgcgttgacaggacggcgtcgcgtgattactagcattcgccacgcagctgtgcaccgcattccgcacaatcggaaaacattccttaagatcgttcacgtggccatcaaattttcgaatcgcatcgctggcttcaaagactcccaaagtctttgccgccttcaaaacttcgtgaagacagcgctttcagacttcgaccagctgaagagcccagctaaagcaaaaggcccgcctacacatttttttgtgtgaggcccgcccccatcatttggattggcggttgatcttgcttccggaagctgtcaacagagtgcttcagggcagtgaagacgactttgtctctatagtggaacagtttctacgcgcggagttcaaaagttcttaggggtcgtcggtttatccctacaacgccaagcgcatggcgaactgcaccgtctctctgctgtggctgatatggaagaatacatagcatagattctgatattgctcttatacagtactctcaagtttcgtgaacagaccttccactgctgcttccactcctgctctgcgctggtttcctcggttcgggatgtgtcaagagccactcttactgaaacgatagcccgaatcaagcacgggtctccagaaggactgtttgcagggtcgaaatgatactgcagagccaaactttgggtcgcgtccattgtggtgctgacgatttgttggaagccgacatctcgggttgttttggattttctcattcgcggccgtgtagttttcgaagccatggtagatccgcgagccatggagatttggtggtccaggagatttatctcaggaagagatggcttgatttgtagggtagttggtatggtagtcataggtatagcatctttggccgtgtcggtggatcgactgtagatgcttgaagtattgtcgtgagagtggccaggaattcgatgtaaagaaaagggctcatactgtatcggccgcagactgaccacgtctcagccctttgaaactgaggtagtaagaacgaaaagtccatttcatgggcgaagcagtggatttgtgctctaggatattttctgaacgactttcctcacaattctcaccaccgttgatagaaccatgtttgaactttccgtcaaagagatctgttgagccatgcacttcacaccgtctgcggataatcacgtatgcaactgccgcgggtggaacttcgcctgtgggtatttgcaatgcttagttagcgatttaaggttagtcctaacggatagacctctaataaaactagacttcgctagctcgaaaagctctttactcctctacttctttgcgtacgaaggggagatatcggctacttatactcgacgaccacggaagtcatttaatgccaaaattcgatgaaatctgcgagaaaagtaaggttatactgatctgtatgcctgcgcactcctctcaccttttatagcctctcgatatcggctgttttgcgtgttgaaacggccgtatggtcggatggttggaatgaaagtgcggaatcggattaaccatatcgacaaacttgacttcctcgaagtatacccatttgcacgaattgaagctttttgaaaatagcttccgtgcagctggtttaatactcttcgcacctgatcaagtgatttcaaaacttggtacttgcattcgaaccccgacttctttcccccccaccccggggggtagcgagtgggacccaaaaacctcttcgaattacgtccagttacaaaagcaagcttcgtcaattaaagcattacttcgtgcaagatcaagaaccgctccgagcccgctaagttctgcgataaagcaggtttcaaaagtctgccaaatcactatgcaatccgctgcttttcttgagaaagtagtaagcgatttacgcgccgccaacgagaagcagaagcaaaagcgtactagatcccggaggcagatacccgcagaagaaggcctctcagttcaagaagcttatcaatcgattactgagccggtggaagcaattgaaccacctctaccctccaaacccctccccccccaccaccttctcggcgaagaaggccttcgccacctttgcagccgcgaacgagagcattactgacgtgcgggttatgtaaaaattagggtcatagaagagatgcatgtccagatagatgatggttttagcttaactgatttagtggcgtttttggttgagatggatgcacgaaattttataagttgggtagggcatccagctcgcttgtgaattacgttaatgcaagcacattgaaactagtttgacgccagactgcccgatcggaaaatgtgatgcggctcccgtatcggaattatcggtaaaaatttgcgcctgagggtgcaccaccttctggcttaatgggtgacgattaagacgaggttttgcatcactggcttgacttggttataagacttctttatgcctgaccgatattggtgtttgaatcgcttcgcaagcaaagtgccaagccatggcacacaaagaaccacttgctgatcatatcgtacacattgatcggggaggttccttttctggaatagggaaaccccgttcaaactgctgcgcagccaaaagattaccgtcaaagcccacatacaaacctttgggacaatcacctgaaagcctggtgtgaactggcacgaatattggttcttgttttcgtctctgcaatatctgtggagcttggggaatgtatgcgacataggcgggaccgctcgcggttgcgtaaaagtttatgacggtattgactggtggaatgagccggcgttctccgagctagcgggaaacgttgaacgatatttgtaacattatccagtccccggcgcagctctccgttggtcgatcaattccactcattgggcttcaatgtaccacctcggatgacgagaacggattatgcgacgagaggttgcaaagtagcggattcagcaaccgaacgtgaggcatggtacgatcttagatatatcaagcatggcggtaatcggtttacttttcgccaacattggttatggaccttgacgccatagggttgctccagaatatctgtccagcagtcgtcctgagtatgggggtactgtgagagcgagtgcaatgggattgaccgacctcgcggttccacgacagagtcggatgcaagtgatataatggcgtagttgaccggtggcggagagcacgtattccggatccaaggaagccatcagagggggaacaacctgaaatcttcggacgttgcaggcctggggttgtcgcatggaggagatagacagcatgcactcgcattggtatagggagctcaagcagacgagacatttgctcgcttcgcattctactcgagtgatgggaaaatgagggaacctgctgttgtgggatccgagtcagcaaggattgatccaattggacgaggtgttgtactttacgttgttcatgaagaatcccccgagtgaatgcttcagacaaataatcaattaggatggtgatcataccagcttaccaaccatatcacttccaattctcttcggcagtgcaagtcaccattcatgccctgttgtattcaggttcgtcgcactctccggctgtcgattagaggaagccgcactggatgcaccgggaaagttcgccagccggcaaaggcccgtgacgaacccacagatgacaagaaactgtacagtcatattgggagaccgcttcgtgtagacggcgagtggttgagacacacagccgttcagggtgcgaaggcggtgaggacgagggcggaagacgggatggagcgcgacgtagtgtccctagctaggtcttatctgacttggcgggaataggttactcgccacaagagatttcgcggttggcgatgggctgctcccacagcggcatgaaatgtcagtggtgtttgtgttttgggggcacagacttcataaataatcgaagccggcgcaacaggaggcgcgatattccactcaccttaccatgaagaacgaacgttccgagcttattcgtcctgtttttggcccgcagccttgtgttgcaatattccataaagggcatgcaagcggcaggaccagaaatggtgtgtaagccggctttgcgcggagcactgacgggggtgctggctcggactcaccctggtgcgctgtcaacggttttctgtccattattagcttgtagatcggggaggcattctatgactcacatgtattgaaggtcaagaccaggggagaagagacgggaaagagctccgtggtttttccgctgggtgtatattggacggaatgcacggatctgattgtttcgcaccgtcattgaagtcagtccagtttcggacagggtcgcgctgggattcacttacctgtacgtgtatgaaaagccgccctttcgcatctcggatactgtagatccaggggcgagacactgagtcggctggtggagagatactcgcatagacattttgtcagcgagcccaaacctcgggtcttcaatcgggcatggaaagcacagtaaattcgctgggaatcacaacactcacaggtcctgcttcaggttcacgatgtatccgataaacgtcagtacagtggatttttcagtaggataaagggaagaacttatcaggtacctcatacacaaggcctgttcgattttgcgtagtcaagtgattgaactgcaagcgaattgccggaggttgagtaaacgtatttataaacttctcagcttctgtcactatgctacagtacacggtatagtagtagtaaatcaaattaatcctaataaaaacaagcttggtagtgttgtgatatgaagctggtgcagatcaggaaccaagccgcactgtcggaattagctccgaagtgtctatacagacgaccaagttgatttccaatcaacttggctaattgttgtatatataggctcatgtatccctccgaaataataagacaattcatacctctgaactacaacagtaggaagcgttgaaggacaccttcccttattgaggcctgttgaaacccatgtaggtatccgttatactgcgactatttgcagcgacaaatttgataccattcgaggtacccactgagagagacgagctagagccgagttgagagctcatgatgctgagtcggttgaaaaaagttggctgactgtcgtatccttcaccgccctctcaaaatgagtgccaaccgcctctggaaatgaaaaccactattcgaaagctgattgcgttgactgactaatgtgctgatcgtaaaannnnnnnnnnnnnnnnnnnnnnnnnnnnnnnnnnnnnnnnnnnnnnnnnnnnnnnnnnnnnnnnnnnnnnnnnnnnnnnnnnnnnnnnnnnnnnnnnnnntagccatctgcgtccgcatagtctataaaatacaccaacgcctgttggaaacagtactgcccagatccctgacttctcctgcggacaaaatggattccccaaacagctcgccaggccaggaaaaagaaggaaaacagcagcccagtgaattgccaatccttagtggtaaggactattcactggaaacttctgatcatgtccctcctttggtaagtgaaacaaccactcggcttcaaatgcctttgctggtcatcgcagccgtccgcttcgcaacacgaaggagaaacaatactttggcgaccgagccctttcaacccgtcgtgaaggtactagcagacctcgaacgcgacgatccagtttgcctttccagcagctcgacttgttggtctctatggacgcctatgggattcgtgcgtgtccaagcacattgatggcgagaagctagagcaggacaaccttgttttgaaggaggctggtacgcacatgagaaaagagagggacggtcttcggattcaccacgacaatcggaaatcagcggtcccaaaaaggctctagccgcatgaccggctgggaatacgaacttttacccttaccccaaactagaggcacggtaattcacacatcccagatgttgtacctgacatcccatataaatgaacaaagataacttatccttgacgggcgtggcgaagatttggtgcaacctactgtaatggaaataagagtgattaatcacagtcagccccatccgcgcccctcttttcattcccatattccaataagcgatgtcctcattatcccataaaatcggtttcctatcccaacacctcgacttcgacccttaattcaaatactgtgtgagctcaaagacacccacaagtcacaatgtacaagctccgaaacgctagtcagggcgtccgccgcctgtcatgccgacggactgactacaaattctagaatggcatctactccgtgcggcaggtggaagagcaatttctgagcggaggtatcggttggacaatctgcgctatttcgcgaaacttatcaccctgcttagaaatagatgcgaacatcctgacccacgtgccccagactcattctgctggcgcaatctatcaagatcaagctatgtccccgcgtccatgctgcgcctatctcagtattagatccaacccatgatgcgcattactctggctatgattctcgtccgccgctctgtgatggccactgaccacacaattcaacacataccctgttggaatatctacatccacattaccttgagagactccgagcaattcaaacgccgctcacacagacccaaaccatatatcaggctactttgcctagccgtttactcctagaggaagggccttctgatggtatcggccagcgtgcttttcctaccacaagtttcggaatatggacacagacccttggatattgatggtttggtcgctttctaggaagggggcctgggttatggggttatggaatggtaacgagcaaagaggaagaataggattgcaaagacccttggtgaattgcgtacgagtagatacgagtagaattcaatagcgagttgccacgtgcaaactaatgcgcaacttcagcaggagccatatacactgcgatttaggatagatgtggcaggtcttcttcagacacgattccaaccccagtgacgaattttaccggacgtttgcttcttcctggtgatagtcgcttcctgggacactcacgtctagtaaggaaacggagtttccttctagtcttcgatatcaaccctttttccggggagtattttttgagactagcgcgtaagcatggggataagtcgttcctgcagtcgctccgtgttcttcggttggctcgcaccgttcccgtgaaataacggttttgcgaatgtcgatcggctggattgcaagacgtattattgcagggcgtcttggaagactcggtaggggacttccctttatcttggatctggataacattagtgggttctcagtctgctgctcagcaataatgcttatatgtatctaagcggacatggtaagctctcctcgattgacttactggagaacgtttgcctttctcggttaacttttgatcctgtttcatgttgcctgtgtcgaagtactgggctaattggcccatatttgcatccgaaagtgccccatatcaatcaaccgaacgtctgaagaggggaatttatatcccaatctataaacccgtgcaatgggttacgcgcaaacgtaaacattacagcattccaggatctccctggcatgtcgcagtgggggttgtggatgtgttgctggaatgtgacgcaactggggtttgccacatcaccgggacaactatgtcagtatgagaaaatatgagaaggagtgccagttagattcgggtaccgtgtggattgagcttctcatgaactccggttagctcttacccttgcaccatacctagtcgtggcgccctggccgagcttcccgggaatattaccacaaactcgacaacctggtgggttttcttcggagtgaatcctgcgtgacctggcgcagaaaccttagccaataggactggtgaagatgaagagtagaatttataaacgttatatcattgactcccgccttccatagactgccgaccttgggcagtgatttaaaccgacgttcaagccgagtatcgtaccacactttcggtgagcaatgaaaacttcgtatgcacgtcaagttgactgtgaggacagactgtcaacctaggacgaaggggggcggtttccgagacgaagatgaagagaggaaaaattaacggtaaaacttaaggcgccggccccaggaaagtcaaccaagcgagttccccatgtggcagacaacgcgtgccagtcggccgagactaagccaaattgcgtactctgctggctgcactatcgagtcgcgatcgaattggtagcatatgagcttccaccaaacaaagacttttctgtagccgccgtgcctttagtccttagttgatgaagccggtcggttcgtggcgacgctaacaatgcgtccaacgtccaacagagaagatcgaggtcctgacgctctccatttgaatccatggggaagggagccggtgataagacgaccatcacgactaccgtcaaacccactatcccgagcagcctgaaaaacgttctcatagttcctcatatgtagatttatagtgtacccttcacgctcatgatcatgggtcacgtcgagacaatagacgtcagtcttagttgtggggagaaatgaagtcatcgccccagtcatcggccatgggatggtcggttatgatattccggtagagatggctgtgttgaacgaggcattgcaaggccgctagcaccttcaccttccgaacaagtaggaatgtattgaactccgaatcgaagggatcgggcatctaaccataactaggctctgcaggggaaaagctgcgcaacaagccactctagcgacgtgcaggcacctcttcatggtgttaggggccagtaatcgagtattccaagagtattcgaagaagcaaagacctgcacattatctccatcgttcgtttcgtattccgaagaagcatcattggatagatagaatgaatatagatcatcccaaattcaaacaccaaattgtaaggttcaagctaggcttccgtcgttagcaattcgtattcccactctttctgcctttctcgcggtccgatgatcccttcgctgcaatggaaaagtcatccttcattcaggtgtagagtgaacagagattttgtgcgaggatgcttgttttgatagaatgcttgttgtgatgagagttgagagttgagagttgagggttggtggttggtggttggtgggtgttgatgagcagatgtggtgagatgtgtgtggtgaaacatcactgttgtggtgaatggtcgggtggtgaagggagcgtggtcaacgtcgcacagaggcagcgcggtttcttgccatttcaaggccagctttgcccctgtttcaaacgctctaatcacaatgctttctgtggggcacttcctgcggcgattccgtaataggaaggactatttccacgccaggtatgtaccctattccacaagatgaagggttcctgcagcggctgccacacgatggcatgcgtgctcttgctgggaggtcccggtggcaacgagcggcacaatactatgcgcggtaattggctagaaatgccgaatagttcgatttggtcacccaagatttccgctcagcctcattcagttgttcgccaatatatatatatataaagcattaaggaatgattgcgtcgaaggtcccacagaccaagtattaggtacgttccttcaaattcatttccttcgcgacgagtccattagaatcatccgttctttacgcttcgatatctcaagttacgatccattttttgaaaacgaaggtacaagcccactctgatggcgccgaaattcctaaagtcgccgatgttctttatttagagccactggggaaacaccgatcccagacactccattcgattattggaagacctctgggaactgtccctggggctccaggagcaagaaagcacccagggccgacttatacgttcctggagccgatggactccagttaaaaaaaagtaacatgagtctcaattaccttgaatgaggtgtctttaattctggacgattttcaactgaaaagcaggcctccatgagtgaccatttggaagcctgagaatgagcaccgaaaagatgcagtaacgatgaaaggattggcttatagggttccgaactttgttcccgcccaagtagatccagagtaagttcatggcgaaggctcgactttgacatctgcctccttcgctttcgctttcgcttgctcctcctccttggtaggctttcttgcccacacgcgtttcctaattgtcatcagtataaagaactttagcggggcgattggcagaaaacctacgcaggttcataggcgtgaatatgcggattcttcaactcctcgcgcactttagccagatacacatgcacctcctcctttgtccacggctccggctccccatagtgtgttagcatccacatcacccagccctccatagcagcgttccagtgggcaaactggagataaccggcctcctttagtaagggatccttcggccaagggcctagcgggatcttgtacttttcctcgtacacgtcgacgaacccggctttctcaatggcgttgcgcatcgtctcatgcgtttggagtgatcgccctgctcgctcggctaatcgaacgaacataggcccccattcaaatagcagatgctctttctttaaggtcccatcgtcgctgtagactcgcacgtctagttccatctgctcgatccagccaccgggctcgagggcgctgtagtcaaagatgtcaggaactcatgactcgcgagactgagcggttagcattataactcactcataagcttgtttgtatagctgggcccatccatccgaattaaatgcgccatacataagacgcaaatggatgaagtcaaacgggtcccgccatgtccactcgcggagcacatcatccacttcaaagatgcagttaagcggcatccatgacacgggcggggggaagatatccacgccacggacggtagctaaggaatgtcagtctaaagacaaagataaagaataaagctgccgagatagaaatctagtacctgacggatagagatcggcaacatcactagagattcgttagaggttccaacaaagcggggttacttggttgaaatacattgcccaactcccttgaccagttccgatatccattatattctataatgtgatatgagcaggatattcagcgagaaacgctttggggtaaatataccttgggcgaattgccgataggggcgcgaaatagagaatttggctggtcgtggtctaggacaaggaagaccatatggctgagatggttaatatcagggagaatgagactagaatggtagatggaatggatttacccgatctcaaaggcctcgaattgctgttggtcagaaggacccctgaacatggttattccttgtaagacaaaaatcaaggcattgcaaccaaccagtaatcctcttctttggtggcctggtatctaggtgcgggtttagttcttaatagcgatcttggactggattatagactgaccttcgaccattttccatgcgtcccttgtggatcgcggatgcgatcgaggtggtctctctattgaagaggagtgagaatgcgactacctagacataggggtagttcaccgtggcaactcacgactggaagtcctgcggatccgtgccatagctggggcccatagagtagaaatccgggtcctagaactttcgagtgagaactgaaaaatcacattatataaaagcagcacccaccaccgcaatttgcggtaacttttccgccatagtcgcgaacctttttttattgtgaagagtgcagggggagataaaaggaaaaggagaaacgagggagggggggggggggggggtggaacatgcggcggtcggggtagatgccgtttaggctatggccaagtcggggttagactgaagcacaaaagtacaaaggaatcggtgacgggccagtaacgatgcatccatcgccagccctggtccaccatccagacacggaagaatatgccttggttgggaaatatgcatcgtgctttgcgacctcgacacagtggctcttggaacagagtgagttgagggtgagaatgagtttgctttggaaggcactgagttcgacatagctgctcatcgggacgaagctgaagaccgtctttcccgtcactcggattgatgctagcccccctggaagctttattgctttgacctagtttctcctcatcgaggtgttcaggcacgcacgaggcccatatgcgtcgatagagcctcgcaggtcgagccgcgtgaaaagcgagtttttgatcatcgcgttcgagatccgctagtttctccaaaatgggccgaaagcgctcggtcgccagcacatctttctggtttgcttcctgccgcgagagaggattgtgatggtcaggcacaattttaatttgtcattgcactcagcttccctatggtggttcaagttcggatgtggcctgtggatgggctttattcctgtgaattgagatttcactcggctgctggcccgttagttctttggggcatccattttcttcacgagcaaataacccatgttaaacaatttgctttctacctggcgccggtctctcttataggctgcccatttgtaaacagataatcccagatccttacggtggtgggacgaatcgttcagcgcaatcggaaattggcaactgttgacggctgtttgtttatggcgagctgttggacatccatatttccattttgacaataattgttgtattgaatcacccatcctacggtagccagacttggtatgcaggagttgacggaagggtcattaacggttgttgaaagcccgtataaataccgtatcaagctcaggcgctcatcgcaccttgtttaagaatgtgggcggcgaaaacgccatgtgttgacctaaaccttgcaggtgtcagatcactggtgtctgatcgttgtttaaccaacgggctttccgtctatcaacttcccatctttgtcaacaaatctatgaaggcgtaatccaacgcagaaaaaatagcaagtaaaatagcgagtttccgttattcaacgctgtccgtgggatggcggacattaactcggcgactcttttcgctctatcggatggaagcgtgatgccgtgggaattccagcggtcacaaagtttgctactactgagtcgattatgtttacctcgcctagctagtcaacactcagtgaatacttctacccggcattccatgcttgcacccagactaatcaagcgtggcatccgaacaacacatctatagcgctgtgaggactataccgcttgttactttcttcttctgcccacaaaaaatgtctgcaaatatgctatttacgggtggaagtccacatatagagcaccaaatcacaacactaccctcgtaaataggcggagaagataatctaatattctcaaatgacatacaaatgccctgccatgaccgcgccgaataaaaggcaatcgatgctcctggccctgccgagtggcctggcgtggaatttcatcaaaatcatgggggcctagttattcgtcatgcgtcgcctcactcggtgcaaaagcacgaaggcagttgtgatggtcactatcatgggcaatcagattgctctattgatccgggttccatccattgcggatcgcgacctgtggtctgttggctcggatgtctgtctacgtcagtgccattcaaccatctcctgctagggtcacctcctgggcattttgaccatgcgccgagtttccttggaacttgccttttcccaaaccaagagaatatcaactctccctacccacagccgcttgaggcgctgcggcacgacagccagaatactgttgctggaccctgccaagccttctggcagcctgtcaatcttctatatagcccgcaggatccgtccaatttgagcctcggaggttcgcaaaccaacatccctcgacggcaattcaaatgtgacgttcagggatgcaagagtcatttcaaacttcgaaagacccttaatcgtcacctggcaagccattcaggggagaggcctcatgtctgctgggtacctgggagtcaacgcagcttcttgcgtcgggacaaccttaaagcacactatgcaacgcacgggaaacgtaagggccgcaatcgctacgtggctaccctagataagacagcatctgcctataaccctgagttctgtgggcagctaacgcccgacggatggccattagattactctgccgaagactgatcctggcgatcgagatgtacgatggcgctgaagtgtcaacctttctgccatcaagcacgagaagcaacgggatagacttgaatacaggcgaaatttgtttcactctagcgctgttattttttgtgatacgaacctacaaattccttaccacagccttgtaaccctccatccgatttctacgaactggttcgacatgaattacacaaatccagtgtcatagaaactggcattactcattcaatcctacttgctctagaatatatctttgcaatgggtaaccaacggatacgtgttatgtgtacaaataagtatctcaaaagtggacatgtggtatgtgataggcggaaagattagaaaaaagcccaaacggaaaataaacaaattagctaaagaatggtggctataatgaaatgctcaaaagtatgtgactgtatgtgggacgtgcgtcgagtggctgtaactagtcaacaattagtaacacggagaaaccttaacccgcctcggcaagcgccttaccgccattgatgttctgctgttctgcctcctggagtccagggtatgctcaagcctgtgctctgaaatgatgaccactcctttcaacgaagtgcccggcaatagaacttgccaaactattgataaaatagttaacaactttgtctctcaatattataataaaagtctaagacctcttaggcttgccaatacctccgtttccgaattttcgaccgaattgtcgaatcatttgtcggttttaaatgaaggtggcagtattgccttaggccgcggagaggatttgactagcaagagcctcagcaagagcctagagagccttttctcgattacaataccgtccgtgagggaaggaccaccgttgacttggaccagcgttgttctgtttgcaggtccccagtttgagggcccagcacagcttaaggtcggaaattctagcgtcgagctgtcagaggatgacctcaaactcttacgctctggtaggccttggcggtttctcttcccttggccagataaagatgattgccagaaggaacttcaatcaaacgacacggttttgcaagagcttgttgatgctcggagagtagtaagcgaaggtgagtgtctgaaaatttcgtctcatggtgcagtacaggaagctaaagccgatcaatgtagtcttggaacaaatttcgcttgttgagcaacatctccggaatcatcaagacttagtttctcagctttctgaaaacaagcaccacgtcaacaaccgaggaggagctctacacttggatggtgctcaaaacgcccttccaaaccagggtgcttttggtcctgttgcctcgacagaagatgaaagctccggttaccaagattcatcaagcgcctacacgactgtccagcatgctagcaatgaccggtcggttcaggcagtcaacgaagagctgaatgatgcagctctgccagaagttgccattgcgaggaatgacttgcaacgagctgtcgcatgccttgagagcgacgcaaggccaggacccagacttcacgcatccgacttcattcagaatctgagcgagtaagtgaagcatccattggaacttcatctctgttaccctgtgtactaatatatgggagaatccttgatgatccgaagaatgaggcagtaatgcgttggtcggaaaatgggcaatctgtcttcgttgccccggaaaacaaattccctgctcatatacttgcaaagttgtccgctaaaagtcaccaatctctcattcggcggctttattactttggatttcataaaactggcggcgacttccatcatgaatcctttagtcgcggtcagcctagctctataggaccgaaccagaagatgagccatagcccttcacgtccttcgcctcctcacagtaatgcttctgaacgtgggcctcggtacaaagtgatcagaagaaagcgcccaagagaaagtgtttgagagatgccaaaaatatctcaatccatcgagcaagtggtcaaatgtgcgttcagccttttcttaggacaacagaccacgaagttgtatccatggcccgatccgcttacctttgcgtgcttcaagtctcataggccgatcgataaaaccttatctttctttgtgtgacgaagtactcttattgccatacagaagcttctgaaattgtttatcatttactctgcatgtggtaggcggttgcttagacacgcaccttttcttcttctggaacaagacttatgcaattttatttgggtattaccactgctattattcatctattctacccctcagatagtaagataaaccctctctgtctactctatgagatgctagataccctatagatgtttcttgcctttctctttcccacattatcatcccggtaattcacttgatggaaagggatgcgctggaagctcagggatatttgccgcctcatgttttccgtccatttcaaatatcttccgggtagcactgcttccatctaactctatctctactagaccaacacttggcggactaggcggtcgttcggggatcgttttattcttttccttgatccgatagaggataaacaagctcaacatcccaataatcgcggcggcagagcaacctattccaattcccactttggcgccggtgtttagaccatcatcgttattctcatcggttcttgggatttcagttgtagctgcagccgctgccaagcccgaagggctgtttggtccttgcactagagagctcgttcccgttgcggactctgtagcaggtgggatcaggatactagggtgtggtgtcgacccaacgagggaactggcggaactcgatgtatcgctggcatttttcggatgttcagacatagtaatatcaaagctcccagtttcatatgcattattgccgtagatgaatcggagcaaatagtaatcggccagactaaaactggtttgaatcgtaaatgtacccaaagtgatattgagttcatccgtaatgtagtccggggcttcttccaggtgtgaagctgcaacgaattgaatcaagagagggagcaatatcgagtcggaagagttataagaccaggcggtgggaagaccgttgtaaacattcacaagatcacctttttgcgggtaggtgattcggaatgctagttaaaagctcaaagttaggactgcgtgtgggaaaaagggagcttgtaatggataaatacgcttaccattgctttgaaagacattgagggtgagcgcaagtagcaacgttgattgcaacatgaggaagatgatgatgaaatctgcgtattattttttcctttgccaagccgcagaagaaattaaagagggcaaatcctttgaacccgcttacgaggcactatttaaatacctgacagcaagactggctttccatggtgaccgcacgataaggcaagccaacgacgcgctaatgcaaggggcagcgcgcaaagtcgtattaatggccaatcacaatagtctagtgtgctcttgttcggaggattgcctcggattgcaatagcgtcgacatgggtcgggccgtccaggtactctgtattccgtactccgtacggacccctggatattaggtcaaattatcggtaagatcagggagggtcttcctcggtcctggtgaaacgccgggataaccgttccgtatgttagggccaaaagatggagactggcgtggctctaaccgaccattacattttttacaaaaaaatacagacccttctaagggagggtccgctactcaaatgaaagggcaggtctttaataccacctttttactttactcctaaaccatcccacccactatgcctaaatgcaataaatctatagcgattcggtttggaaaagctcttgaccacctctcacagcaatctaaacccaatatctcgaaaactgcgcgagaattcgcggtccctgagggtcgattacgccggcgatggaaaggtggaaaatcgcttattcaacgacaaattcaatggcaggaagcttagtacttactgtacaagagcaagcttcatatgactatattgaataccaaggttagatacggacggagcatcaataaaccgccgctaaattgctattgcagccagtccaattctcaaagaaggcaccatgacgagacagaactacccccacaaatcggcgaccactggctgaaacgtttccttaaatgtcatcccgagtactatatacgacgcccgtgagctcttgtcgtagcgctgcacctgacaaatcagtcgtcgagaagtggttccaagaatatcaacggttagtgactgagcacgggatatgccaataagatatctacaatttgacgaaagtggcttctaaattggcgtcggttgcgactaatctgtcattactagggtagacttattctccttgtttgatggggtagcggtagcggaggtaccgaaataattcctcaggaaggacattgcgtgtacaaattgaaagaggcgtctttctaattggatagtcgagaagattgagaccgaagattcagctgtgatatttgctttggttgcaatggactgaacctgaagccggcggcgtttagtcttcaaaatagccatcgctatcgcagccaattcatgaaccacggagcttggaacaatccatccgatgtagaatccgaatctaggccttttaacagagtcccgtgacataattgggagcccattgtcttcagatggtcattcctagctggagatatacctgaacaccgaccaggtgaccggtagactgcaaaccggaccgattggcttgaagcctatcaaagacaccacccattaaaaggagcactttgaagtgctggaatgtgcacaggtggcaagatgggcagttgatcacgccccgaaccgccccctccggtttacacgcaccttaaatggaagtgtcgccaagatgatggggctagaaacatcggcctacggggagagagtgtgctataagacattccataacctattggagatcaccatgtggcaagataggattcatttccggcattgccgccagacaaattgtgacgagaataaagggatctttttgaggttcgctttgtcgacgttttaagagccaatattgttcaccattttgctgcatcgttagaacagaagttccttgatcgaacctagttgattcacgaggattcagggctgagagactgccaatgaaaagaatgtctctgagaaaaataatgacgtactttgtcagagggttcggggctaccgtctgagctagtaagttaacccttgtccggtccagaggaaaatttggatggggtgagaaacaatagagttgtcgtagctaagcttgtgcgacaaccaacctcatagtttactatcgtggtgaaatgagccaactgggtactggctccttccaacccaactttatatatcatgttaaagacgatcgctagccagccattgggggtagtaaaatccggagacattacccgtgaatgacgttgctcaccagttggtttcggttcccagtattgatcatgtggttaaagtctacaagcgacatacatacgtgcttctgagacattcactttaatttgatggctttctctgtcctacgtcttgggtaatggctttttaaaacccaactattacggggatctgacaattcagtgccgttgcgatcttaaattgggctttgaagagctaggtccttttactagggtgattgtgagctctttcaacggaatgcatgagacttcatcgaaccgggaatggcctcatgaaatcctttatagtcggcttttcaaaggttgtgcatgtcaccagagggtcacggtattgaatgacaccctttgatttttcgaaagcaacgcaacgtaaattatgtagcatagagttgactggagcgcaatattaaaagggtttgagcagaacaagacaatgtatcatgccgtggaaaaaacaaattactttagtatgtaactgtaggagacgcatggaatgttgtttattggtgaagcctacgatcatgacgaggattcgcgaatatctgagttgtgcaccaggtctttgtcccttggcacttttttagagtcagggtcgtaaatacaattcaagctaccggagagcagagctgctcttgcgaggaccaccaaatcatcgcttgggctgtgcttgcccgccaacagtggttgctactggacattaccgaaacactatagcttgctaggaggactcacatttgtctaacgactcgattgattctgccgtctcggtagcggacaaaaactccacagcggcagaatcgattggccatcgctccagatcattcacaccaacaacgccttggtttttgccatttttctgcatgagccgcatcatgatcgacggaagagccgcaatatatgctatttcagattgctttggagggcaatctatatgaacgtttgagcttgctgcgaaattttagtcaggtaatgcaaggatgcggccatcaacaaacctatcttgacgatgaccccgtcaatgccaaataatatatcaccacaggccagtgattggtgcgcaaggccaaatgaagataagtagcaggcaccatccaggatctaaaatgtcagaacagctcatcgaagggcatgagggaccaacctggcagataatggatcccaattctgtctcgctagaataaacagatggaaaagcgacaacatgcgccagcgtcagcggcaagtcatcaactaagaagaacgcgagatcttcgtgcatgtagcattcatgtaaggagagaacgttcctgttttctagacgtccgaatctgtatatcaatcttcgagcattctctttcccgtatgtccggatggctaccatgcgagacaggcgagtgcggcgtgtggcaattgtaactttgccagcattctcatacgtaatgacttttcgataggtatcccatggtgactcctgccttacaatcaggacggatgcaatattttccagaccacacaaatggggtaggcaaaggcttttgggaggccccgtgacaaccttcgaactaccgcggcggtgcggtcatgttagatttgcggtggccgccgtatggctctcgcgggtggtgggggccgacatcgaaatggggagctgagattgagctttgatagtgccaaggtcacatatcatgttgtctttggatagttttgatgacatgatgacagggcggtgttttctcggattcaaaacgtgcaagaactaagagagaaagtggacttccgtttgttttgtacgcgcggtgttaaggattcgactctcggctgtgataggagatgccagcttcgactgactgtcgtaagatgaggccgatcagccacagtgcttacatacaaactgttaacggcacgtgtatccttttataactgacaataagctgttcagccatcatgaacctgagtctcgagctaattaagaattcaatacgaatcgacacatgaccgcactgcttagcataactcaacttcctcaggatcttgctacccttaaccgcgctagggaataatgtccacggacaaattctaggtttcctatgaccgacaacgcgccaaaaataaagagacggaagccatcaaacgagccagagtctgcggcagcttctttgtaatggcggcctcatgtttcgctcataagccaacgagcgcaccggatcagacatggtatggttagtacaataattggtaggccatgaagtggcaaacttgccagtaattattgcgttgcacagagttccacttacatggccatgtaatgatcactcgcaactcctatgcgaccagcatcttgtcgacgctgcaacgagcatgttgaccaggtgaagagagagaatcccgtggacttggttatggttaggtatgcctttggcttggaagctcgcttttcagcacggcgagtcgctctctcacaattctcggacgaatactggcacagctggtttgggcctcggcgttctagaattacctgtcttaccaatactacagtttaatatagtctacaactgatgccataatgagtcacttggattaatatgctgacatttagactcaaaatgactgccaaactgccgagttatcaggaccagcagtcatgagctgattaacggaataacacaaatatttcaatacttgtagagcacagagccattgcaacattacgaaggaagcgggttaaataatgtaaagagtgactggttttgatattcgaggcaattcgacttgcgaaactgctatttctcattgttgcccccgattggtcttgcacacgctgtctaaattgtctaatatattgcattgattgtagatcaatgtgcagctggtttggcatatttctttctgcttgctgagtgtactaacatcgcgcagaaatcggtcaactccttcgcacctgaaagtcccttagtcatgtactgatagatttaaagcttaacaggttctcaaatatcgattattggttacataacactatatttgctcctcaattttcaaggaccagttatgctatcaaaatataaccagcaagattagagggaagaggaggctcagtcatacagccgctcctcgtccgcagcagcacacttccggcacttatcttctggctgtgttggtggggaaccaaaaacggacacagcgtctgtttccatctcttttctcacgatgatctcttcgtacctgctctgtagtaattgggtggcgagatgcatagtggaccactccctgggggaaatggtgtcggagatcaagatgtggtcggatagcgtttgtaggtattgaattgtatcgttgaccattttttcactaatttttatattgcttgggagtctcttttgatgcgccagttgtgagcggcccggtatttgagaggtggagtgtgaatgtcggcgtcgctttcgtgggggggttgaggattcggctgctctctttttcgcgtccagagggggcaggtcttggctttcagtctttatgacgcttggagacaacgtagaggcccctgcgctagcaagagatgtagcgacggaagtaactacctctgtagctacagagccagtggactggtcaacagtctgtagtaaaacctggcttgtggggccgcgatactcgtggaagaatagatcatcgacacgacggaagtttccagccgattcattgccttcatgaaataggtatgttagccgatggattcctcgagaaggggatctaaaataacgataccagtttggcatgtacgtccattgtgaccttctgtgtctggggtattggacttctttggaatctgtgttaggttgtggtccatgattgattggcttcgctggtgatggtgttgtactggcaagttattggaactaaagaaggacaagagagcatcgaccgtgggacaattatgaccttttaaatgtttgaggctgaagtggtcatgcccaccatatcttccgggttattattatcagggccgactgctaggaggaatatggatgtcaatatgtgaccacaatagtggtacgtacacccacgatcgaatcaaggatgttttaatccagtggccgtatccacatggttctcgagcacccaattgattcgaagcatattcccaggagcaacatggctgccaaaccattgttgctcatgaataggacgtgtggaagggagttcaatttctcacgacttgggggttgttagagggcgatgattcagccgcgccgcgctgccacgataaagatccgactggccgagggtctgttttgtgcttccaggagctctggaggctttaggttctgtggtcataattcgctggtactgtgccgacatgatagtattttttgagtgttctcattccagcacctttggcgatgtacgggtggtgaatgatgtcagaaagttgaatcaacgtccacaagttgaatataaaacaccgttgaacaccagcagcatgtgagttttccgcctatagaagatatccatctgagccatgttgtttctttgccgatactgggacttaattaagtttcccactcgaagctcgtttcctaatcggccgcgttggttcacctaacagcgatggtttttccatggcttagagacgcatcctgcactggctgttaaacacaagctcaataaaagagatagaaaagaggtgactacatcttctggggactgttgggtagatttccaatcaacagcaaaccgcagtttcctcgggtacagcggagtgatatatcgcaaacagaccaaggcgaactacgtcggtatcagaaatcttccgtcgatgttcgtccgaatttgaaaggtctcatgcgcaatcacgacacatattaagaaggttaataatatattatcaggaaagtaaatccaaggaacaaacgggtgatttccggggacccgtactgagagatcaagcacttctgtaggggccatctggcgtacgcataggaatagtgcttcaacttgaatcacttttatctagtcaaagcctattttggctgccactaaggcaagtcacacctcttctgcgcgggcatgtactggcgaaagagtaagatgaaaagcctactatatactttctaaaacttatatatattataatcgccctacatgatcacagatatcagctcaacaataatatcttctccagctgattacatgcaaacctcgcgattgacccgagacgcttatacatttattttttcatcatgtcctgcaatcctgctcatctacaatgggtattgggccaagtattgggtgatcccttgcaccgtgagcggtgcatatgggcaggagatgacgggaatcattgtcaaaacactgtgccgcttgactcccggataaatggagtattgtgctttcagctgctccaaaaccttgctttcgcgtatccaccagcgcagggactttccttggctgcaaagcggttatttcgtttagagtgcagacgccgtcgctgtcggccaaaagtgtgggccacccgatttttgcatctgttggatcaagccaaagatgacacggttcactcggaacctcatgattcgactctattggtacatcaatggccaaccagcatgtcccacaatgtcgccacagccgtttgccccaatgagtctttctcaaagcccgaagtggccgcctggcgaagaagccaaactagcgacatacccctaggttggcccgagccgtgaagatcgaggatccggacgttctccagacgacaagcgccttcaagtgtgcagtgtgttacatgcatccagtacaaaccatgacattcacgaatgacgaaagtttgttactcgtccacgcagtgcgatctctcaacttccctcacgaacgagtttcgcacggaatggccacctgaaggctctttgttctcgcacgacgacccgacaggttgtggaactaaaaagagtttagtttcagtctgctttgtgaatgttcgcggtagtgggtccaaactgatcgaggtgccttcatcccatttttatgatctattagcttcatttggggacgcctctggggatggggcggctgatcgtcgtgtgcgttccaagtcagaagcggcggtaggtatctctgggagaggctttgatcgactgatactgagaaaagaatacttgaattcatgaagctttcgcttaagcctctgaaaactcgaagtacaagaccaagttttcctcatatctcacagtcaacgtggtgcgtgagaggacggcagttttgaggagatcgttgggatctggggaataacaataatactcggaggcctattcaaaacaaaataatatgataacactcaacgaaccatttggtgcagtcactaagaaggattggtaacctagaagagctagtgaaatctacttttggtaggtccgtaccacaatgcgagattcgcggttaccaacgtcaattggtatcgatattaagctcaaacgcggtatatctgtttccttcgttccaaatgatttgcagtcaaattaatgtcacggttaagtttcaacgaggtctacttgatgtctaacattcaacgcgtcacaagtacacttgtaatctaccttccttaggttcggtgacgatttttcaacgtttactcttttctcccttttcggatatccgtgagtaattcgaggtgagcagctcacgagatcgtgcatcagcagttgaactaactgttcactggctttcgaaagtgcggtcgatcctaggtgaggaaagattagtagaaataacagcagccttagcttgacttatcggctataaatagccctggagaacaagttctgatccaatccatctcgatgaccaaaatggaccgtcccacttcgccttccccaattgaccggccagccaagagacaatgccgagtatcccaagctccagaggatgaacccaagttggaaaaccatccacagcaagcttcaaacggcacaacaatcggacccagggtcggtcatacccccctgggcaggaactgaaaaacccactaatattgaataggttccagtgagaacacgcggcacccttacggcggagttcatgaaagtagtaaacctcaatgactccctcgctacaccagccctcagattgctcgacttgtacttttgcctatgggaatgctacgtcgtcaaatcggcccagaaaatacgactcgaggaggagcagcgacagcttcaagcgtcaaatgacttgctagcaagcgatagtgatatccttctacagctctgcaatgaacaagcttcagtattgtgggagcgcaagcgagcggttcaggctctttgtaatggtgttgtttcagccctggaagcgagcgatcttcaagcctactctgtcgatgagcctgagccttggtaaagtgtccatggtagagcgtctatgggcaggaagaatgacatttgattttccgctatctatttctgttttccctaaggagagataaggcttatactgccggtgaactttcgttgtgttggtgacgggtgccaacggtgcacgctgttggtacgttcaacgcattcgataacttagcatatagttataaattcccctagtttgtcctcgttctgtgtaataagggtggaataaaaactgctccgtctccagctttccatccctcccaacctacgttaaatcgctgctttacacacttccatattttccctacagcgttcgacgcccagtcatatagcagaaatgaacggattgaacgacaatggtctgtacccatttctttgatgatagtttgacctaatgttaatagactacgatttggatatcgaccttcacgctatctggcatgaatcctgtagcataccaacaccgccttcctgtctcgctactgatccgaatgatctgtggcaggattttcttggcaaagtcgaccctgcaggatacgaaactcaagggtcttccttgatcgaatgccttttctaccccaatctcgacagtctgtccggctccaagtggacaggtccagatcctctgtccaactactcacgctagcggcattttcctctacatgtcagcgctccttttccctaaagaggcgcactggatagaatttcgatttgtgcgatttgacccggtatctggcgagactataggagaggatctgttcttcctaccgcgggttgaaacgaccctgggaaaaatctctgtcgggtacgcaaacagttgctagacacagtcacctggcatgctgttcgtgcaacaggcgctagcttccgattgtccctttggcctcgtatggaatctttaccatattcgagtctctccacacattctccgctgactgcctgcccctgacgctatccctggacccacggttttttgtgcataatatatcgggtaatcacaggtgagattgatccaaaacatgcgattacttgcagacacgttgcagtgaagacgttgataatgaatcaatggctaatttatgcgttgaatgcagttttctatgaagaatggctaattcatgggaaatggctaattcctggggcccaccaacaccgggtaggtggtggtgggcttggcacgattagggggaataaacccagaagagttcgtccaggggcccgatactgtgaaagaattcgtggagtcgcataaatccccattgacaaaaatgggcggaacagtgatgcggagggaacacaggacggactggaatgcgcctgcatccaactgtgaagtccccgaggcagaatggggttacgcagacgcgctgactgatgatatcgtcggctttgcagacgagcatggctttcaggtcaagtatcttgactacgatcatgctgaacatcccagtcctctcgttgctgatgcgtatcaccgatggaaggagcaactgcgccgtccgacggattcgatcctcgttgagagtttcgttgtaatggagccgtggttggcaattagttacaatctgacgccattctccacggtcttccatattaaaccgtcactagaacggctgcaagagtatctggagaagtgccacaggtcggggaaggcgtttagtgacgggttcatgttcttattttgctctggggttgatgctgtcgggcttgcagggatggacgaatggaagaggctgctgggcagtcactttgcattacacgatacgggaaagaagcttgacagggacaagaaactgttcccgggaacagaggaagatgcgttcccaaaagactttggctttcctgcgcgttactagcctgaattagcgagggcggtaggcgaagaagcgcaatatgtaatgccgcccagcttagcgcttagtgagtttgaacgttatatggcggagaatagtggcggctatagggtacattataaggcttagtttgaatgcgagcatatggctacttggctagttatagctacagctatatattcttattatatacccgtacaagttacgtgagactgataattgaataggtacgatacgatctgtcgcgggagaattgtagatgcccgtttggagtgacagacccagcggccttgcaataaacaagtgagttcagcgtcctcaccgtcccgctgtgattgcattgttcgccagagtggatggtgtaggttgaacctccattggttcaactatgatcaggcaatacgctcaagatcagacctaccaggtgtagaagcatgtgatgaggtgcggctcgaacatacaattcgttggcttaattaaacatcgtgatgcgatagactctgttccttgcttagtcaaagtcatcgctttaggcggcgattgcaagtcactcgaacctactctacaatagaatgcctacatcctagagcgatcgcgagaaggaaagtagctttgccacaaaggcaaccaagttattgagagctttggacgagcatgcaatcaagaatacccgatcggctccttctacatatgggagccgtcacgaccttgtgagtaatcccccgtcagtaactacgagttatatttccagccaatctacggtagatcaatatccaccacttcgattgaagcgacggccgttgctttttgtgaggcgtagtgcccgagttcatgcgatcaaccatgctctgctgctgagagaacacggttgaagcccgatcggggcctagcaaaggccatctgaaactagacctggtaaaaacatctccaccatcatcgtctaggacgaatttacgcggggtgatatcctcgcgggggtgctctagttcgcttgtagtggcagcaggcatgcgcctaaaccattctcccgaaagcaaacatgacatgagcgctgattagcggtaggaagttcagtgtaggatgtagcaggcagtccaagaggtcccatagccggacggctcttggtggtgttgttacggacatcaaacccaccttcatggtgaatctgttctaacagtgatatgccagatgtcgtccagagcgcagtgagtctgacacatatataattgatgctcaaagaacagtcgacgtaggggacgtagagaatccgccaatttccctggcaagagctgcttgcgcgcgatatgttagaagacgatgtcaatggacaaaggatacacgcggtcagcttgactaacctgcagctgcagtgacatccagggtaacgtgtcatattgcttgggctcggatagaaaaaagcgttcttaggaatcaagtataccgaccatctgaccaacaggaaacatggcagttgcgcgttcgccagtctatgcgcacttgaccatgatttcaccagagccctacggcaaaggtactcttaacaactcgccactggccacagatagcatgactttcctcgcaaattacgcccacacgccttcgaagttcccagcaaagaagtgacttatcggactggccaaaactactcgacgaaattttacgggagcgcaacgcacggcggtgggtcctgccaggtgggcctcactagtgatcgcgaacctacaaagaattcggagtggaaggtcatcaattcctatgaagggggttgccctgcaaatgtaccaggcagcataggtggtggctctgcctccggactttggcttggacttggttcaaccgtcgtggcaatcgtgagatgtatatgaactgtgtacccatcaccgtagttgatggcccatcgctaagcccccccgagaacgtgtggaaccagtcgcttgcttttcctgctatgttcgtcaccaacataaatggttgcatgaccagagagggagtagacattcgttttcctcgaccaggtggcattgttgaatacaatggcgacgatgagaatcgtgcgagagaggacgagccagcatgcatcggaaatcctacgtttggtccatcttcagccactgatacaaccactatagccgaaagcgatgcccgtcgtaatgatatttacccagagccgctctggggcggttgtcaggctccgtaaactgatagggcttacgggcaaagagctcctgcaacgttgatgtattcagaccctagagctttcctatggttgaaaccgcgttgaataaatccgacagaatatcacaaataattgtatttggactatagcattttgtaggcactgtaaagcttctctgaaaacatgttacattttaaattcgtccagctcaatcaagatcgtctgccatgggcgaagttcccacgagccttttacacctcgtcattttaattgtttaaagttggtcataagcacctcatcacaggagggcaacacatatgcgacattatctagctacttcaattacatagacaaaaaaacaacaacaagaaagaatggctgaggtcggcgtattcgaagcagcgacggataaatgcgctgacactacctaggaatttctcgtcagtagtgagcgagttctcagcatggtcgtgggctacataaagcctgattcctgtagacaagatatcactagagaaatattgtagggcacggctaatacgtcgggttcaaatacatatagacccacgtgcttttgcagacacgtcaaatcactagtatcttttagcacgcccttcaataggaagcgactatagactatctctttgaggccggcattggcctaaagtgatacagacggccggctggaacttttctcgtagaaataattccagggagaaggagactacactgtaaacagtcgggaaagccagagtgtggtctcaagaaagtcaggatgtctctatccaatgcttgatccaaagctcccgttcacttggttttcctgaaattgaagcgcattgattctcgcgacttgttctaggagggtatgtaggcattatatagcacattcgatcactgagtaactcaccatcaccgatggtcgagggtggcgcccgtagacttcggcggtgttcggtaagtgagtaatgacaagtgcgtggattattgctaacagctcgaacatagtagagccctaatagagattcgtaagacgaagcttggtagggatcatcctgacacgttgaccgctttggcgaatctcacatctcactttcacctagaaatgtttaggtcggaacaccgacgctcttaattcaatacgaacttgtttaggcaagcagaacaagcctaaggcctaatcaccctgacactttatccaattctaagacattgctccaataggaagccgaggggctagacttttgatgtataaactaagacagctctgattataatattcacaaggttctccgcgggtctgttgatctcgatatcggggaatgaacaaagaatcttaggcttagtctttccaaattagggaaaacccgagcataggcaagtagaggcgatggtgacaagaatgcatgttaaacatcctatcatcagcgtgggtgaggtggtaagaaaataagaaaacctccgcgctacgtccgtgagacgcgaccactccccttcgccgcccggccattcaccacatgtaactaacacttacatctaaatgaaaataatgcgatcaactagctttccgggaagcctccgatcgcgagcaaagagacagcgttgcgaacagagccaaagatgccaagcgtttatgtttcctacgaaataagcggtgttttcgcttgtattttgattgcatattgcatgataatgaaacctttctatcattagcaccgcgcaccccaaacccttcgccagaacagcgctagactatctctgagggagagctttcatgctgtgatttcttggatcttctgaaaaggatccgcttggcccatttccagctttccacgccggcaaaaaataaaacagtctccacgccaactattccccattcccatgatataccagagtgcttgaacacatcatgattaataacaggaatacagacaacagggaaagccaagatagaacctgctaggatagccaaaacaaaaacttattccgccagacatcaaacatccactgagtgaaatacgtttcgagtctggttgcatgcggaagaatgatcggcgcatgtcaaccatttcccatgcaagaaaaagggcgaaccaggtaagtgaaataaaggttgttgcgcgtgcacgaaacacaggctcgcactgagaattgaaatttttgttgcagttcaggccaaggtcaccgtcgccaaagccccatatcactagcgaaaatgacgagagacacagcgcggtcatccaaaggccgtaaacaaggatatccacgaccacctcccatgtcaaaattccttttttctgcgaaggtgcctgttaattatgccgacgagcttgggtatggggaataaaacgcacgctttgcggaggccgatccatgatatccggagctgcgatttccataccaagtcccatgtctggtaggctagaagtaatcatgataacccagagaatctccactggtgatagtggaaagactgactggtcgctttcatccttaaatgcgcggccaattaatagggtacacgcctgggcgacattctctgatagtaggtgaagcacaaatctttgaatattatcaaagatccgacgaccttcttcaatcgcgttgagagtagatgcaaagttatcatcggttagcacaatgtcagaagcatctttggccacatctgaaccactctgtcccatagcaattcccacatccgcaatttttagagacggagagtcactcacaccatctcctgtcattgcgacaaagcgcccgcgcctgtgaagtgcgttgatcatgttgactttaatctgtggcgcacagcgggcgacgactcgaggtaaaacaggaagagcatcaacttcttcatcagataagttatcgaattggttgccagtaaagatcatagcccgtgcaacatccacagcaacctgctgaagatcaggtagtatgcccacctgctgagcaatcttttctgcagttccggggtgatcgcccgttaacatgtgcactgatatgcccgcctggtgtcatagctcaacggctctggcggactcaggtctgggcgaatcgtaaatcccgaccgagcccaggaaacaaaggtctttctcgacctccttccggtcctccgtatctggaacagcgtctctttccgcaagggcgaaaacacgaaggcccatccgtgtcagagcttccatattcttcatgaccagcttacgatgctcgtcggaaagggtactcggcggggaactttgttcgaagacaaattcagagcatctctcagaatgcgctctacagagcctttcgcgaatgccacggacttcttctcggtattatccgtgtaaacaacggtcatccgcttgacgtcagagtcaaacggaaactccactttctgcgtccatttcgcatcctcgcctttgggcaggcggccgcggtcccaagagaatctagatgcaaagacttgaatggcgatctcagttggctctcccgggcatgccattcactgccctcaacgcgctcgctgccttcgtgcttcttcttgtagacatgtgctaaattggccaatgagcagacattgaggtagtcctcaagctctttgttgtcggccagcagttcgtcagacttcttggtcactgcagccatcttctcctcaacgagctccttggagccagtccctggaaactgatttctccaactgtcggattgaagggttcactaccgccctcgagggaatacgttcccagcgaagcaacccacgcctgtttcacaatcattttgccctgtgtcaatgtggccatcttatcagagcaaatgtttgttaccgctccaagtgcctccagggagcttagttttcggacaataacatggcgctgcaccatccgttctgtccagactgccatagtaatcgtgagtaccaccacaagacaggcagggagcatactaagacctgttgctacagcgtaaagaaccacctcattgttgtctctccagtagttcgcgctcatcaccacaatagcaaagacaactgcaataccgaataaaccaactgccagcctagacaatttcttttgtagaggggtcccaatattcaccccgaggaagcggccaattgtatcacaacctgttaacacccatgcttgggcatgcaaatcaccgtctgatacagttccacgtgatccaactccgggttgctgagctgtccgacgtgttccagcgagcggaaacgcaccaatcggccatactcgaagctgcatcatgagggccctctgttagacagaataggtggtagatttgcttcctaagcatgcatgtttctacccatgcccaaagtaatatgtgtaaagacccatttttcttgaatgtcactgcagctgcagctcatcaagctggccgcgtgtacaccttttcattgacaccgtcttctaatatatggcgcgcaatcagctcttgccagtaatcactggattctctacccccctacgttgactgtcctttaagcatcatttatatgttcgccgaaatcaccgcgctctgaacgagaagtcccatatcattattcgaacagatccactatgaaggttggtttgatgtccggaaacgtcgtcaaaatcactctggctgttggtcctcatggactagatcccgaaatgggcttcaaccgtgtttctcagcagaggcgcatgattgatcgcatgaacaagggtactactacggcttacggaaagcaatagccgctactttgattgcagtggaaattggtcaacagcaggttggctggagatacgtcgtagttactcacaggggactatccacaaagttgggacggtctccatatccatgcttctccatagccgccaataaattgactgacttgtactaaagtattcggggacatggctagaaagacggtgtggctttaaagacggccctccttctatcactactagcctcaggcttctgacacaggcgactagctagcgtacctactgacttttgaagacgatgccttcattttctattaatatctgtataatagaagacaaagggagtataacgagtgctgaccattcgcgattccgctgcttccgttcggttcctgttccaaccgcttatcctcaatctttcgttgacgctcctggtcctgtatgcgttcacggatggggagcaagaaagggctcaggtaggtaaagatatcctcctccgtcacatgagtctcccagtcgagcaaaacgagcaactcgtgctccatcgagttcacctctggcagggagaagccaaacccctcgtaatttttcaccatagtgtactgagcccaatgcttgttcttggggctagaatcatccaggctcttggcggctataattagcgaggcaaggaagatccggtgggcagaacaacgcatgcctatgacgactcgaggaagacgagcacggagacggccgaggtacacaagggagctcatgaggattgacacctggacctgggagtgatcaaccagagaggcagtaaagtcttcaatagagggaagcggcggaagttggtcggccagttcaactggaggagttgagggcggcattcgttggccgtgctgactgacgatattggtcacatgagcctcacatgagatgacctgcgctgcctgctgggccaggtacaccaccatttgcggtgaaactcgctgagtagcaaattcagccagtgctgctctgttcaaggcttggtgagtagccatgtccgtgaccagatagagtgttgcaactgctgatacatatcatcccctcgaagactttgagcggtcaaaatctgaagctcggtgagctcgtttcactagcttctcgcacaatcgtcattggtggaaacccatcgacagtaaaaggaaaggcggagcattcttcgcggcgttgggcatgttgatcaattccatgactgaaacttgggtacgcatggataattagagagatattgacctgggaagcaccatacagaagacggttgaaggtgggtaaccccggaatgcagggttcgcaccgtctactaagaggccctagacaggcgtaagtgagtctgtctgcatagttcgacccaaggcagaaaatgctgcatgctccgcggagtgcttcggactccatttttgtagtgatgccaatcatatgatgtcccttggcgcccgaattagactcgagacccagagtccatcacatatgagatgatcaaaacatgaatcaaaagattacatacctcacagtgaccgtagaattggcagtgagccaacgtttcttaaccgactcaacttcacacattctcaatacgactctagcatgtttctctcggtgggcatctaaaatgacaccaaaaagtcagctgcaaatagttgcggcaaaaagaagacgtgggtttcaacaggcctcaatcaagagagatgtccttcaacgcttcctaccaagttggtaagtgacagaagccgagaagcctacaaatacgtcctctacccccggcaatttgctctacgatttattcacttgactctgcaaagtcgagcaggcttgtgtctggcgcactcgataagttctcccctttgatcgagtactggaatttataccgtactgacatttataggatacatcgtggactaccaaatcagacagtgcctataagagatgtgattttcaagcagatccactgtgccattcacgccagccgatcagagatacgagatttgggttaactgatcaaagtgtctatgcgaagacgtctgctatagcagccgactgggctgatcctgtcgcgcctgtggatgtacctcaaatttgaagcgcgactactcatactctaggtatgtgaaagcccacaaatccttgaaactgcactgactcgaaagacgcgagacaaccagatccgtggacattcgaccacaatgcaccagtgcaagggccacagctccttgccgtctcttcatccctggccttgaccttcagaacatgtgaatcaagaaatgtctcgctgaccgactgtcctagctaacgtctgacagtgaaccattgatagcgtacgtacccgagtccccccgaaccccccgccccaaccggcgtggggtccagcgctaccgtcagtgctccgcgcaaagccatggcttacacattattccgtcgcttcgagcaatgcagcatgtcctaggtggaagattgcaaaccaagatagcgggtcaacaacagggtgcggccatccacttgcgagcttcgttgcatagaaccctgagacttccatttccatgctaaggtttgtgagatataacgcctactgcgccgggtctcattatttgtgccaagccttgtgcccaaaaccacaacaccactgacatctttctgccactgaggaccaactcatctccacccatgaaaatattgtggcaattgacctattccgccgggtcaacgatcagaccgtggcgggcctacgacgcgtgctccatcgcgtcttccgccctcgtccccaccgccttcacactattgtggagttcctgaacctctggcatcgcgacacattcatccaccatggaagtgcaatttttatcacaagtgagttcgtcacgcgcgtttgctgtctcaaggaattgcctagtgcacaccagcgcggcttttttgaagcgacagctgattgcgacgagcttaggacatggcatgatttgtgactgtattgcagaagagaattgtgagtgatctagttggtaagccgatatgatcaatgcgcaaactgatcgtcccgtctcaagcacagattttggggtttccatgaactggtaagctctagcaacccgtccaactggatcaatacttgctgactcggatcgtacaacagaacaccctcatttctgtcactcgagtcgaacgccacgcgaacaaatgtcttgtctgctcgagctcccctataccaatacgatcgcatgctgcctgtcccttccacatgactactatcgacgatgagtcgccagaaggttcgtatcgcgtacctcggcctctttctctatacattctgtgtatcaggtcattgttcgatttgtctacctgatacaagacctaaactccgatcagcctataccactgccccactcatacctgtggctaaacgttcaaacctttaaataccttcaagcggcgtaggctgctggtgtcgaatgtgtgatcctcgttatcctcggatggcatttggtgtctttccaagcctggaaatccgtaagacacaggaatgctgatgttctgtcttgcttcatggtgagctatgcctccgcagacagtcaggctgttagcacaggtccacctgcaaggagaaggagacgcaaagtctcctcattcttagcctacaggttgacattggccatctcagctaaaaatcgagaggatacgaccggggcacaggcaaaccaatgagagagctcactacccaagaatcacctctgacatacgcgaagctgcgtcatgagggctgtcaaaagtgttgtggtgtatcgtgttggacaagtggtgggtaggtttgattcttatgcacgcattttcctacacaagccaagcatatgtgagagaacacagtcatcgtggaagtcactgcagctgcaggttagtcaagttgactacatgtatcctttgtttattgatatcgtcttctaacatatcacgcacttgtcaggaaagccggattttctacaccccctacctcgactgttctttgagaaccaattcgtcaagctcaccgtgctgcggaggacacgttggcatgtcactgttcgaacaggcagccactgtaaagactctggtgtccgaaacaacatcgaatcagaatggttgtgggacctcttggactagcccctagttcctggagcaaattttctacagttaatcaacgctcatgtgattattgctttcggaaggatgccggagtgtctactacgactacgagcgaactagcactcctgcgaggatatcacccccgaaaattcgtttcagatggcactgctagacccctatcgggcttataccgtgttcttttagcagcagagcatggttgattgcatgaacttgggacagcacttcccgaaaggcaatggccgtcactttgatcgtagtggatctacgggagattggttggaagtataattcgtagttactgaggcatagtggaaggagccgatcgcgtattcttgattgcttgcttgtccaaagctctcagcaacatggttgtctctgtggtaaaattactttgactcgcgctctctgagatataagaactggagtagagtaagttcgagtgatttacaatcgtggcctgaagtgatgactttgactacgcaagacacaaggcctaccgcatggctgatcttactcaagccaatcgttcggcacctcatcacatgcttctacatgtgggtcttcggcgtattgcttggtcatagttggaccaatggatcgaccatcccaatcgaattgaggctgtatgccagcttcaccgagtgatcaaaatgggactagagatggcttgcgaaatagaatcaatacaaattgatatgcacatgcctcatgtgggtgagatgacaagaaaaaccttcgtgctacgtccgtgatacattgatagacctcggcccatgaggcccatggattcgcattgagttacttccccctgcctatgggcgggcgggccgttgaccggcccatggaccgcttattaaaacagtgtggatggatggatggttgggttcgtctacgctgaccccttgtcgaagtgtgatccgacatacatagaaatagtgatgcggctatggtgggcgcaaaaatatatatgaccgcggaatatgttgaacctacaaatccacccacaatatactatctaacagtcacatcaacaaatttattataaacatgacatattgaacgcactacataacaggatacacctttattatgatcaattacctactatactagtggttatggcggtaggtgacagtgacagacataaataaccggataaatccagaagttgaagttgaaccccctattaaagaagcttacataatctgggagtggcatggacggtgcgatggcgaggtcaagacgttgaccaccttcaccgctcgaccattcacatcaacactcactcacttcaacactcacttacgggttttgcttggtgattttgtcaacaatcgtatagtggcatatacgaagcatgcatcattcaattaacagtggttctaattgcgaggataaacaaggtcaggatttatacatacagatgccatatcctgaacatttgaggattgaggagaataaggtaaccggttgacgtaaggtccttaggtgtgggtattattcatatcatgcagcgccattacaggtacttcgtactatgatagatactgcagtaagacggccagcggcaggttctagggggcatgttccagcggaactgggctgagatattggtgtggaaagcccctatagcgatggcgtgtcgttgatcattgcctcgtgtttctccgaagatttcccaaatcctcctgtggctatagacagacattatgataggccgataataatatagataggccaataatagtgaacaagtctgcactccaaattaagagtggataggtctgctctacataaaatactccgtagtatgtacgataactgatccgcatcctggtggggatcgatccttctctagtaagctgactccacctgtggcgcaatagttcgatgcatattagttactgcgccacagctgaatgaacacagtggctttgatacatcgttatcaggtaaattgttttgttggccaccgatcgacagtcgatgagaggtagtactatcgtgtggttccatcgcagcatggtattcagttggtttctcccgtcaatttcatgcggaaatttctccactccgtccgctcctcctcctggacttgacaagtctgccaaccgtacgttcagaaccgggcctgccatcgcgtccattctgttcgatgtccttgactgagttaacactagcagggaaaagatgtctaggagatcaccagaggaacccgaatatgcccactttgctatggtgtacatagatagcaacgggaatctttgccaaagagcttccgattccatttcagagagcttgcagtccatcctctctcctagcgttaccggtagattcctccaagcggtggcaatgtcgagagagacccacggaacacgacgccaaggtaactgtctcaatttaccctacctgaagtgttttattgacctagaatagttcctctagggatcctagttccgcctaataggcaaccattgaacaacagctctgccccatcgcaggggcagtccgcgagttatagcggaatggagctgggtagtccacagaggatgcaggttccgtttccatctcaaccagagcccccgttccagccggcaatgtggccgtcacgcgaatcttggcctctacaggccggttcacaggccgagatgaattttggcggtcgaacccttaacttggcctctcaccaaagagtcctaatctctataaaagacagatgtcttttgcgtcgctactacgagaaaatatttcaaaccctacaacaaacaaactgccgaatcattgccaaagcctacatcaaattagtcgagccgcgcaagcaggttaactatccatacaatggacggaaggtcgttgaaggaagaacccaacagcttgatccagaggagactaagccaccgtggcggccgcgaggagtgagccatcgggagccggaccatctcccaaaaattggtaggaaaagataatcattccgcatatggtaccaagctgacaacgattagaacgcattcgacttttggtacacatgctctgtgacatgcatgaaacccatggagtcacagcggcgagattgaaacaatgcgatcagtccattcggcatcaaatccttccggtcgagcgtttagaaaccttggatgaggcatatcgagtgcgcgaggaggagggaagattccttgatgggatctcaggtacatacttgtccgcattaagggcgacgggcaaatttactgttggcatgacggcatgtttgccagatgcttcaggctttggggtcattttcttgggtcttgaagacttcgtcgcagccgatcatactttttccaactgctgctgacagattcacctgcaggtcccagatgaggtttgctcacgaggtgaacttgagcctagagtgaaaatagaaaacaagaagaaaagaaaaaaaattaaatcacgacgcttacgctgtgcgtgtcgatcgcgttcccgtcgctggcctctgttgaacattcgagccgggatctgcctagctgaaggggtcggcatcttcacagcccgttcaccagcgttgactgatagccctgaaacaggacagtctgcataacttttcaatgcgccgtaaatggctcgcaaacatgatgctcggtcaatgactgtctgcatcacattcgcgtcccccgtttctatataatcaaacggagcccgggattacacggcctaagttcgcgcttacccttacatcagtcaggtcgagtcgagaccagttcggcacattgctccggcgttgcaacatctgtctacgtcagtaccaaagacgaaaaggtgagatgagatgtgagcagaaagcgtcgatatagattaacccgtttgaacgcctctcgttctgtccccaactcaacagtaaagactaaaccccagtccaactctgtgaatgtggtattaggatcccaactgcttccctcccaaatccaaacgtggaaataatcgctccaacccaaagagagtaatggaccctacgaaaaaaagaatatgcgtagtatacctgtatcacgtcatatgccattttattatcaaataagattttcgcatcagaaatcgaaggcgaggctcaggtcgaggtgatgtccgtcggattcagatccaacactggcatagtcattgccgacgcagtccagaggcatctggcaattgtatatgggcgatgacatgggctcgtcgaagaacatattggtgtaatcggagttggtgatcatcattcccatgtcgtcgaaggagccgaatctaccgctcggacactgctgcccgccttgtagagctagcgggttgacgatgccctgcatgggcagacctttgtgcataaattgaggattgctggccatgggctcctgcttgacgggagcagtgatctttgggtaggccggcggcgtgggcagcagagtctgcgtctgcgagaaagcgtccgaaaagaatccactacgagccacggggctctgggagctttcggccccatcagaagattcctggcgccaaatgctcttacgacacagctcctgctgcatggtgtcggggctatcctcgaaacgctcacccttggtgcggtcgagggccccgagacgagtaaggatgtcgtgagtgagcgggtggccgttaggctcggtcttcaaacactcgccgggccagccttcgccctcggtggtgcatctgtagagttcccgaaggccgtgcaccagccagatttgttgttcctggatcatctcaacgtatctaggaacggtgggagtcagcttatgcctcagggtaagatttagattgtcaacagtgccagctcaccccttggggtacactttattgtgggctatcttctgctccccgaatacgcagactgaagtatctgcacggcagcgcgagcacgggcttgctccgtcacacttattcggtcagtttatgggacgacgcgccagccgcagtgccacataccttggatttcctcaggcgacaacgatcgcaggccttgcaggcacgcttgcgaacattgtgcgagcgcgagtggttcgatcctgatgttgattgtcgtgctgccatagtatgtgtcacaaggtaccggtggagaggaggaggagtagaggacaaagggtagaagaacagacagagcaaagtaatagcaggtactttccaaagcaagctatgcttccagatccggagggcgcccagataaatgacgtcagtcacaacgatctaatgatgtcgcgactaagaggatgagttttgccagtttgagcgaaaattataaatttgcgtttggatctggacatggctggcttctgtgctatgtagattctgctaatgaaagaccgggataccaaacacatcagcaaaaatagagggtagtgcgcgtggcaccgcgtcatatcatggttgaacgtgacagaattcccctggggattgaaagccacgatcctcttgacgacccatcagcgctgggaacgtacatcttggccctgggagttctcttgttcccgaggggtttggtccagcttgtcagggatatacatggagcatgcagcaagaatggagatgatctgcgggacccacatggtgcatatgggttctcctgaatgaagcctgtctcttttgcttcctcgcgctatccagggtggactggagtttttccaattgctggttattcacccggaagacgctgtcctcatatacgtaaatgtgaggctctcgcaacgtagagtgaagatcccaggggtaggtctcagtttcctagaataggaaaagagtggctgctgtggggatgcgcgtctcatgaaattgctttgaggttaccgttttttattcgttgatttccagagtcaaattaacaagcaagagattttgtcgagactctcctgcgaacccgccagttgtgttctctgccaacaaggtccgtcgccgcgctcaaggctgaaaccacagtcctcatttacttggttaccgccgttatgcaccacgctactcgcacttttcactatctggactcggtttcgagctaagacatattcgaaatcaagcgaaactgccaatagctttaggggtgcattgacatctagcacttgcaaagacggaacgggtcgcgtggtgctctgtggagtttatctaccgcggaatttattctcttactggctgctaagcttgctccaaaaatctatatcgcagctgtgttctctgttgctgatcccaatgccgagtgtttgtcacatggaaccacgtgtgtttgacagtcgcttcgctaatttcaagtccagttctgtcatacctcccctgtaaactgtgttcacctacgctgagtggatttattcatgcagaccggcgaagcggtgtagaggtagaaaggtattgtggcagatgagctcttgctagtctagctgagcgacggggtacactctgctccactgataccccttgaaatctcactgacctctggcgcagttgactctgacggggatcgttttggggaatgagatcttgacgtgacaaggtctctatccggaggtgattcgctggcggtctggacgaaacgtgtctcggcatccgacgagcggactcgaagcgggcgaatcaaagcgcctatgattccttcgtttcgactgtactcatcggcataccgggagttgcagaattggaatcactcatacttaccacacacagcatgatgtgctgaaatctgtatctcgcctttccaaccactctttcgcgcaggctaagtgagagagcgctcggcactgattacaacgcaagtccacagagtcgtttgcatatcttcatcctcattcaagcagaacacacagtggatgttgctgacctctttcttaggctgagtctctggagtgtcgagtcttggacaccagcccagatattagttgccgatgacaggatggctggtcgagtcggcgatacgtgccatggaacactgttttgtccgcagcattgcggcagtaacaaaggggtagatggttgtactgactcggagcgggtgaaaaagggcacctgccagacatatctgatcctgcgacgagatagtgaccggtgagtgttgtctgacctcgtgtagcgtcgcctggaggctgacggcatctgacgctggccagaatggataacaaccgacggagagctaattctagagccatgtggtacatgcgcctgggtgcgggcggctgcttcatgccactgttgagcaacttggtcgggctgcagttgcccctgccatctcgcgaagaagtctctgacacataatgggttccagggcagtgtagtagacattgggttgtggcgaagacagaaataaattgaataggtgttgatgtcgcacaatcaccgcggcgttccctcgccagcttcatatgtcatcgccgtgggacccatccctacatgactgtgtggctgctgacatggaggtcttcccttgtaacggacgattcgtcaaaaaatgcgttcggatgcagtatgcgccactatacagccatcagaggcctgggaggaggaacgtcttattccggatcacttttactcgaatcaattgcatccgtggctgtacattacgaccatgcattggggaactcgctggccaatagcagcgtaatcggcaagtttgcgagttgcctttggacagtttggagtgcgttttaggtcataatttgctttaaacttcaacacgataggtgcgacaggtcgtacccgtatcatttagtctccccgggccactgacacactcctaggaaccatttgggggttcgtagggttctaaggtccaatgtgagggtctcccgtacaaatagagggggacagcttcatccaaatggttaatgaatattaaggactaccacagtaactctaggtacaagacgtaatgcaagtaagcccaagaaaggcagcctcctcgcgttcaggggaaccctgatgctcgacgtcggtcccgtatatcatttctccaagcatcgcgtatgcttcgagtataaccctgaaaaatgcgactagagctgccaggagttaacaacgtctttcccagtcggactgttttcctttattctgaatttgcggttgtggtctgacataccagcgcttgcgccaccccgcccatggctacgtcacggtacccgctattgctgttaataaaagaacttcattggaataaaaatgatagacacaatcggcacacctcatccagaacatccaggaagattcagacactggttcagttcaagagagagataggaatatttgggaaacttggggtcattgttttcccttgacgataatcatcgtggaagtcgttcgcggcgctataagtgccctagccggtcacaaagattcaggcaaagatccaggcaaatcctctaaccatttgtcgcacgaatctaaccaacctaataaaagtaaagtttgcttcaatgatagcaatggtaagtgccaaggtcaaacatgaatccatcatggtgcttcacaaaactaatgaatttgtaaagtcaaccgagcacgcgaagatgccgtaggaatgaccgctggttgcgtggccaacgtcgcgaataagattaagcgtaaagttgacggagacaacggtcatgactatcggaattgcgcctcgacctattgcccaaaactgacttatttaagagtagcccccgatagtcaccatcttggctccgctaagcactacggcagcggcggaaattctggaccccataattcccgcatttgcaataagctggactaccgtgtcgactccagcagggatggtcaatctcccaatgaagcctttccacctaatatctactattatcctgcggctgagtctacaaccgctggctctcgcgagactactagccacagcaagcaagtttggcccacctggaccgcgcctataattcgagcgctggtacaaagcagctttgtttggatgaaaaggccatctgaaggagacgcctcgaaggatacgcctcggcagtgagtgatctaggggatatgtccaggggagtaatcattccagctgggatgcgggggtggtgggggataggtcgtggaaggctgctgaaccaaaggtttcccggatgatccatgctgcaagcaagctggaatagtggcgcacaagtcgcaatcgcccaattagcaaccgttcaggcagcagtggaaaggagatatcaattggaagaagaatatcgaatacgggcgctagcaaattgattcattttgcaaggccacgtctgccatttgggacggaagaaacgacagggccttatccaccaccattccaattcagcgctctcgcaaaattcaccactttcctttatcacatgcccctaccgtatctgatattgtcgtcatcaattaatttgcgtaagcgatcggtatcttttctgatccccctggtcgtctaccggacggtccccttcttgttatgatatgaggctggtgcaggccaggaatcagaccgcaccatcggaattaattcccgcattgtctatacgaagaaccaagttgattgaaaatcaacttgatcttctcattgtatatatagcctcagtcaatccctctagtataatgataattaatctttctttgaattacaacaggtcatgagcccgggagcaatctctcgggtgccgtctctactcatctgggaaacacctttaccatcttggatatatacctaccccacttacccaaccatcaccatgtctgctctggttcacgactcgcccgaccgagccgtcacggccgccgaacctttgacaggaagcgacaacttcgcaatctggaaacgtctcatgacctcctaccttaaagcaaggcaggtctgggacgtcgtgtcgggcgacctcgagcgtcccgtctgtctattcaagtacgccaaaccgacttcggcagatatccaccccttggtggaaccgcaccttattggggcggtgaggcagcgagccaatgaagcgcgcctcatgagattttcaaattcactataacccaagaacactgtatcatgtctagcgccaacaagtgtgcggttgggcgacatagacggaaaatcagtcatttaggggctagaaggcatatccaaatacgttcttattacccctgcccggctgcgaggggtaccgtgtacttggtaattgagccttcctatgatgtgtacggtactctacatatattggtcaaattgccattgcattctacccatagtgcatgttcatggtggaagtaagtttatatccggcggctcagatgctattgctaaaatacagtattattagaaccaaacatataatcaacatcaacatctccgcctaagtggtctgactaagactcaactgttcaacgcactcaaagaagagcctcagctgcacaaagaccagaagtaacaccagcaactttaccggacagttcctgagcggtgccagtgcaaataggagaagtagagccggcgtggttgcaaaagagctactcccagagccagcgatcgacttacaaggaataggcatatgttcttcttgccagccatacgcacagcagccataacactcagagttctatagcagtattcacttcaatctatcaatacaagcaataccagccctacaggaaaggtgtgaggaagcacataaccaattcaaacgtgaaatttaatgtaaattacctcgacgatagcaggaccagcaacgatattgtcatcaatcgcctgcttgttcccttagtcaggacgacgtagctctgtccggtcgaagtggaggtccaggcgttcgagcgccaccgtgaatggtcgcgccgcgaagccgaggcctaccacacgatcttccggtacctgtcccccgatatcagtatccatgttgcgggtcttaagacgtctcgcgacctctggagtgaactggaagaacgtaccggcgaatggaactcgccacgttctgcgagctgttcgcccagcttcgcgaaaccactggcgagcgctgcggcagtgcgcgcgaattcgttgatcgtgtacagctgcccgtacattgtctgaatgccattgtgcccggatcgattggcgatcgagcacatatcgcgatcttactggcgcagatcggtccggaatatgtcctaattgtggatggcattcagaatgataaggatccggtgaatccgaccacgatcggaaaccatctgtcgaatgctgaacagacggttcggagaaaagagtctccaacacccccgcaggcagggtcggcccgccgtcaatacggtgcagcagactgccaagaaatgcaactattgcaagaagcgcggccatgtggtcgcgcaatgctggaaggaacagcgagaagcacggccgtctagggaccatgccctgaaggccgaacggagtgtttccggctcaccagaaaatcacatgcagatgataacatcaatacagacgaaagttcggcaggacccgccgacttccaagagacggagggtcaactttgtgagcaagagggtgacgaccctttatacccacgcaccgcaaccccggtggctcctggactcggccgctactagctacatctgctgggaccgggcttgcttcagcagcttgcggccctaccgcgagatgttagacacaccgggcgatctagtggaatccgaggggatcggaacggtgaaattcgcgctttgggcaaagtttaaccaacccctggtgttaaagaatgtgtacttggcgccacgtatctgaatggatctgattggcgtgccgaggttgctgcgagaccgctactcggcggtggcgcacccttagaacgtctttgtgcaacgccgaggacgggcggttgggactgcgtaccactcggaggacgatctgtttatcctgcgatgccatgtgatcaaaggatcccgaggttgactttcttgacaaggttgcgtcttggcggcaggttggaaaaataacttgaccgcgcgcttaccatgtgtcgcgcatcgacacatggtaagcatggtcacagcttggcttgcgatgattgatcatcgggcctagctcgtccaagcacaggggacactctgtgcggcatcgttaacaaagccaccgcagcgggccctggccatatgagggttgacagctaccttggacgactttttaagtccggtcgtaaaaccatattttgaagtgcggggtgtgatcgtactgtgaactgtttatagtaagtcacattctcgctgaacaggccaacacaagcccactatatgcctgtgaaacctacgatataacgggccgagaacctgatcgtcgcctatggtgggaaaccctaaatccatacaattactcgctgattggatgaaaccagacatatacgaagctacgcgcatctagaagagcatggtcccaagggggatccaaaccgagcagcgcgcacaggcttgataacgaaaaaatgaagttccatatataagtaacttttcaggaagcaatgattttcgttgtaatacctggccatgtcccaaggagtcttacttggaagggaaaaacaatagtaggacatgacatgatcacctgcaacgagacgcagccgctctagaattttcatagatgcgcgagatttgaataatccttgcatggagtacaccatagaaatcactgtttgaagtatttacaatacaatgcaccaacgggagttgtgctccttttgtcgctctataccccaaaatctcgctgtagtttcgttcgaaccctcccatgcttgggtaagaagtctcggagaattcaattgtcgaaagcatctgatagtatccttgaatgtcttctccacgcctgcgttatacttagcagatgtttcataaaaccagcaatctagcgactgtgctagaattcgaccttccctagctgagacctcacgtcgggatcgtaaatctttcttggtaccgaccagaacaataggcgaacgacacggacgatgagaaggtgactgctgtagtgtattttcgatactcatatcatgtttcacctttttgatttggttgtagtacgctcgtacattggaaaacgacgctcgtgaggctacgctgtatgcaattatgaaagcttctccgtcccggaaatggtcttcgtggagcgctgcatccgtgccatcaccagcagtgtccattatctcgagaatgcaaggacggttatcaaccacgactcgggtgcgataagaatcgtctagcgtggctcctaatccctcagcaaattcgtctaagcaaagctaagcaaggtcttagtacgtttcgtggacagcggcaggggccagacgtgactgacccgaacagctagcgccgattttcccacatctgcgtcaccaactaccacaagtgtcaccttatcagtcatgatctcaaagtccctgggaaaggtgcaatgacggagaacgtgtcacagagggctgcattgaacttcactgctgaaatagcggcttaagtcacacgtcgtgcgaatgtcttcagtttcatggatgaacaactagtcaccggggaaacagggcttggtttgcgcagtacgtaacgatctttgcccgtagtcctaagattctaagacacggacccccagttagcgaatgccaggaaacaacctgacgtcttccggaagaacggatgttgacgccatatgtgtgggtccaccagtggactgccaatgatcgttttgattcagttattcagttacaaagattgcgacatgagaattatcaattaatcttaaatgaactggtgcatatgtcaaccgtcggttatgagatcatcaaggtagctcatctccgttctgcgcgatagttgccgttaggcttctgtgaatattgagagtaggatgccagagatatcgacaaaatatagccagtagggtacccaattttcatggaactgggatagcgttaagaattcgtcggtgatcatcagactcagcggaccataaaaaaagattataaagaaaacacatatacctccgaactaaaacaagttgtggtccattcccgagagcgaatttaaagcgctagccgtctccacaggtctattgagcgctcatcgcatgaccaaaacaatggccgacatctttagtcgattggcaatcatcgagactgaaaaccagaatgtgaccaggcaggcttcaaacaaagctacagaaggcaggccctaacgtacgacgatcaggtcgttagcagcagctatgccactcaagctttacttggatatccgaccagatacatcagagcgagatatcagtctgtgaatgttcaacgctgtaagcagggcttccgcatttacccgcgcttctgttttcctctggatcgatcttttgcctcttacagatagtaccatctacagcggtcgaatcgctttttggccgatagaagtttggtttcatccctgaacgatgatcggagaagagaaaatctccgaaacaggggcttccgccccagtggataaagtcgctatcacttgaactcggaccctgaatatttcctgcaaatgcactgccgcaaccttttcttgtggtgcgcgagggaattgtaaccgctcccagacgaaaggaagattcaccatacctcaggtattgctgcgaacttgttggcttttcacgatgggttgagcgttcggcagttgattgttctcagcgatgtcttcacgtctaccggaagtgctccgtgtcaacaacttctggggggtggcaagtgctatctcgaccgccttgccccccaagctttcaactgcagatacggtgagttgagttcttgtgcagttacgggaatcaaattgccattgctagccctaacgtggcatttccccagcggcatcgtgacattgcccgcaacacggaaaatattgcgagagtgcaaaagaacatccgcatctgtgtttggcgcaaaggcctcgcaaggcaagggaatttctccggaaaggcaggctgagatatcaatccaagtttgacgcatcgaaagatcaagcaggatacccaaatgaacaggatgagtgaactttagcaacatccagtggaggaaaggacaagccaaggctccattttgagcccgaaccggctgttctgagtcgccatgttcttttctgacctttgctatcggatgatccatgtaggaggaagtgcttggtctggtgttgctttctggcctatgtctgacgcgccaattgaccacaatcaataaatacaacttgatgtaggaatataacatgtgcgatccgagattgcccaactcttgtaaactcacctaaatatagcttcgtgcgcacgatcatagcaacatatctcgcgcattgacatgggtaatgagtagaaggttaaatgggtttagagtggaaggccatgtcccaagtgaggaaaggcatattggaggtgaaagataactgtagtcgataagggcggttactttagcaattggcgacgcatgcgggagaatgaatacgcacgaattagtagtgagatgtaacaaccattggaatgttaccaagcatgctgatcaatgtcaacccatctcatcgactggaatgtaagcaagcaatcattagccgaaagcgctaagatttcaacttatactgcgccaatgacattccgtaaggagtcgtgttttattggttgcctcatgcaaagatatcacaaggcagacgagatttacgtaggggcaccttattcctgcaactaccttatttgctcctggcctgtttgtctcttatgaggttacgcaataaattattccggattcctccgccacaggatcgttaagtcactaaaatatcattttcacattcaagacgacggccggtcagcccaacaaagctacgccggcctagcttgacaccgcatgactcctacaactacacaaattataacggtaactggcggtgctttctatggcgttccgggtacccgggcccaggtataagatcgtgcgtagaacaccgggtgcatcaaatgggtaaatacggacagatgctttcttatatcttagtcaatcgccacaagatacttttcccgtgccaatatatcactgccaattcgaccagtgtccccgaattgtatgctctagatcaaccttctcgcggtcgtatatggctaaatagaattaccgaatcttcatcgctctcgaggcctggtcccaatatgattccctcggataatatcagtcctcaactttgactctctaataatggcgataaatacgctaacaccttgctatacttaaggtatttgttagtgaaggacgcaattgctcaaggacatgtccacatctgtcgagtgataccaagaaagacacctcgcgggtttacaaaagcgctagcaaaagaccaatcccagatctttgttgagctccttgggttggcgtaagccttccatgaaaaatagggcttctatagtgtatgccaggataattcatctaagtcgtttttgatattcagaaggagatgggatgaggatctgagaggggggatattgagtgagtgcctagttcccaggcataacattggagcccatacgttaactaagttactctcttctcttcttctctccgtccctttagtccataggaatcgaccacattattcctccatttatcccgatggtagtgtgatgccaacagtttcccaattggttggcggacgcagggtccataatccgtcaaccaagtggccgcgctagtcaacaaccacaagcagtcgccagtacggttagatgaatattaactaccgacagggacgactgggttcctagggccttcgagaagcccttgatcggtcctcaatatctcgcccccgtgacccgtaagcagccacatcacgcgggtaagtttccggtacagtaaagatggggaataaaggagcagcgcccagcacaaaagcgataggacaaggatgacgaagatattggtcacgagtctttcggtaggggtcataacgtatgggccaaatgtgacttcatagcgatagtactcgaggagtataaagtgcaaaaattgttcttggatgttgtggcgttgcttgcgcgtgtttgctatccgtgcaacagctttcatggtagaaggacatttgctgactagattatcgacaatgtggatatatgtggatggcatatagaacgcttcgatctccgtcaacatggcctctcaaatatgaagaaaactgatacatacgagtttgacataagtcggaaatcggttcgaagacccaccctaccaaggaacttcggcatgcgaacggtcggtcgtacttggaacccggccgtattgttccaaactctacacaccagcccttcccccaacccccacctgatgtcgcagcccgtcacgctttatcagtgacgtgtgattaaccggaacctagctaagtcgagccgccagaacccggtaaggtacttcgtgagagtcgatcgtaatcatagcacccagcccgttttaccatcgtatccattctgtcactgctctccctcttcaccagtgattcttattgttccctgggctgcttaatttacgctaggggcacggactacttcccggtcggcttgaaaaccgggatccacagcggtgcagaattcgtagggcaatacttgagaccagcaataccatgccaaaggacttgggaaggggcaaagcagccggaaaatctgaagttcttcctgtatttggttactgtaccaaaggactagttataagtacttttctacctaggtcctcctattggtatgaataattgccgatgcccagtgccagaattcttcttctggaacgggtacaagagtttcacttctcgttcattaatcgcttattatgttgctggaaaaccgagcatacttgtgccactgtcagattgtttcaaagaggaccgggactcagccttggtaaggccaagtccggtagccggtattagggacaaggttgacgatcggagtcttggcggggactgttacagaagcgttcggtctggtttttgccatgggtcgtatgggcagcgacaacacgggcagcaggacggcaagcacgttgtggttcggagcacattttgaattaggggcagagtgcccctgagcccaccggttcaaccgtgagtgtttgatggcaggacggggaatttagctacaggggctgcaatggacatgtctactctggagctggattgagcgacattgtcaagggtgtttcgaagactgatttccatgtctgcttctacatacttttatccatattaatgatatctaatagcggtgtatccgggacgttgatgggcttcggtcggagcaacggaactctggcgtactggggataaccagcacagcgttagtgtatagtaggtcgagaaggaagactccaaaaactgccaggtctgaaccgccgacgggtttgaatgatactactaagtctaacagttattagatcagggaccgcacggtattccgaggcagctatctgcaccttaattaccaaggtggtcctccctgttcaatcggggaaattatcgtgcgatgaccatgtatgtttgcgggcacccggttataccgggctatccataggctgatgtaccgtcggaaactaagacctgatgctaccgagcagacaggaatgttggctggctccgaatatgcagtggtcgaactgtttccgaaagcagagcaagtgtagcattatccgagcaaggagtggggaggcccgatgtttcacgggatctggtgcatcttaggcttccggcaccgacttcagccgataggagttgccgcagcaaaagtggctctagcccctttccccacactttcctccaacccacgctatctagaaaattacgtagcgacgcatccatatttaaaggattcctagcccagagtaggcctaggtattgcttgatagccaaatattcattggatcgccatcgcctttcgattgcttttcaagccaacgccgcgttcaggtaacgttcaggtttggtaagcggctgtggtcagtcgtaacctgattgataaccacaccatgtgttcccaactgtgtaatgccactgatgtagtcaagcaggcagaattacgtaattacgtcccctgggtttgcaaaaggtgtcaagtcttcaagtaatcgacgcattttcctagctcttattccctagtaagctgttccaccatagcaagaatcggcaaggcaatgattattgcaaaatgttgaaccgagaaggacggaagaaatccatcagaagattttgggtcatgacattgaccagtgatacgcacggagtctctcatagcggagattggaggtatgaacgattcgacgaaaggagaaggtggcgttgcagcattgattttgactgacccaaaattgcctccatccagcgggcaattgttggcctaaatatagtggagatgttccttccttactgaatcttccccactagtggccgcatcttcccttccggcttaacccttgaagtgtgtagtattttcgaccttagacttaatgtccccggattattacatatctcttttccgctctttgatagagaggttggagaggcgtatttctttaataggagcggagcacttataccttgaccatgtcaaaccccgaactatcatacctttgttgatctgcggtcaagtatcacctgaactcgcattttgctccgaagaatgtcgctctttggtgattaataggacgcgaagggcttcagagcccagcccttcaacaattgccttaatcaggtcattgtctgacatgtgtgaattactccctttcccagaagcaatcgatttcgaccgctggatagcggaaaccgaggatcaaaagcccaaaccgtacaatctatacaacgttaatgttgatcatcaggccagatgccagagcaagctattcatgaacttaaacaatacgaacgttctttcgatcagactcgttggctgaagatgcaaactagtgcgctgttccgttcaggttattcgcttttgaatgaaaattactgacacttttagtagcgcaagtcaaattcaacctaccacagtgattacagtctcgcgttagatgaccctagtcgtggcgctgcacttgcggggcacgcaaccgttgagagggaggtcattttagttgtctaggttccgctttttgggagcgaatatgccctcaactagacacctccacttcgttgaatgcctcagaaactcggtaaatagtattgtagagcttgcagccaccaaaaaaggacgtttgttaaagaaacgaaaaaaaaaaaaaaatgtatctccgtttgtcacaacttcaaacttgagtattgacaacgtttggccaagcttcaacgggttgatgggttgagcacccgcacatcctaccgtgacctcgctttctgcagtctaggcggacagacccactgctcaacacaaaccaacacaacactaaaacgaggccagaaacaaaggtccatgattcctagggatggaattgtaggagttttcggtgatccaacgttgagtcgccaacatatgaggtgactaggacaagaaatatgtgaatacgtgcctgtcattgcggattgagtatctcccacaaagcctcaatttaagagggccgtgaaggattcaacagttagccaacgttgcttgaccgactcagcgtccctttctctcagcaccactcttactcgcctctctcgctaggcatctaaaggcatcaagaatgtcgctgcaaatagttgcggtaaaagaagacgtgggtttcaacaggcctcaattaggaaatgtgtccttcaacacttccaaccaggtcggtgagtgacagaagccgaaaagcctataaatacgtcctctacccctgcaatcgctctactatttattcacttgattctgcaaagtcgagcaggcctgtgtctgacgcactcgataagttcccccctttgatcgagtactggaatttataccgtactgacatttatagtatacatcgtggatgagcaaaccagacagttcctgtacttaagagacgcggttccaagcagattcactgccccatttacgccagccgatcagagatacgagatttggattagctggtcaaggcgtctatgcgaagacgtctctgctatagcgagatgatctactgtcgcggctctggttgaccacaaatttgaagtgcaactgcccacgctgtaggtatatgggcccacaaatccttgaaactgcactgacccgaaagacgcgggacagccagatccgtagacgttcgaacacaatgcaccagagcaagggccactcttcatacctggtcttgaccatcagaaaatgtgagttatggaattccacgctggtctactggctaataattgacagtgaacctttgggagctcaccagagtggccctgataaccctgcactaccgtcagtgctccacgcaaagccatggcttacacactattcctagccccgtcgcttcgaacaatgcagcatgtcctaggcggaatattgcaaaccaagatagctggttaacaatagggtgcggccatccacttgttgcatagaaccttgagactcccatttccatgctaaggtgaatgagatctaacgcctacagctgcgctgtgtctgaatatccgcgccaagccttattcccctaaccacgaacaccactgacatcttcacactattgtaggggcacccctcatcgacggtgaaatatactgtggcgagtggcctattccgagatcgaagataagaccaaggtggcggccgacgagcgtgccccatcgcgtcttccgccctcgtccccaccgccttcgcactgttgtggagttcctgaacctctggcatcgcgccacattcatccaccatggaagtgcaatatttatcgcaagcgcgttcgtcacgcgcgtttactgtctcaacaaattgccttgtgcaccccagcgcagcttttttgaagcgagtgcagatcgcgatgagcttgaacgcgacgtggcatggctggtgactgcattgcagagagttgtaagtgatctagttgtgaagccgatatgaccattgtgcaaactgattgtcccgtctcaagcgcaccttgggatttcaatggacaggtacgctacggcaattcgtccaactaggtcaatccttgctgactcggatcgtacaacaggagaacaccctcatttctgtcactcgagtcgaatgccacgcgaacaaatgtcttgtctgctcgagctcccctatacaaatactgtcgcatgctctctgtcccttccacatgactactatcgacgatgagtcaccagaagattcgtatcgcgtacctcggcctctttctccctagattctgtgtatcaggtcattgttcgatttgtctacatgatacaactcctgaaccccgatcagcctataccactacccgaatcatacctgtggctaagcatgcaacctttcaaataccttcaagtggcgtaggctgctggtatcgaatgcgtgatcctcgttgtcttaggataacatttggtggctttcgaggcctggaaatccaaaagacaaaggaatgctgatgttctgtcttgcttcctggcagatgagcgtacctccgcagacaatcaggctgttagcacaagtccacctgcaaggagaaggacacgcaaagtcttctcattcttagcctacaatttgacattggtcatctcaggtacaaaccgagagggtaagaccggggcacaggcaagccaatgagagctcactacccaagaatcacctcgcgggcatacaggaagctgcatcatgagggctgtcaaaagtgttgtggtgtacccggttggttcttatgcacgcatttcctatccaagccgaagcactatctgcaaaggccatttaccctgggtgtcacttcagctgcaggttagtcaagtcgaccgcgcgtatcctttacccgttcatatcgtcgcctaacatatcacgcacttgtcaggaaatccggattccctacgcccccctatttcgacggtttttttgagaataaatcatatattcgtcgagcccaccgcgccgcggaggacacgtgggcatgttactgttcggccaggcagccactgtaaagtctttggtgtccgaaacaacatcgaaccagaatggttttgggacctcttgggctagcccctagatcccggagcaaaatttccatcgtcgatcaacgctcatgtgatggttgcttttggaaggatggccggagtgtctactacgactacgagcgaactagcactcctgcggcgatatcacccaacgaaaattcgttccagatggcactgctagaacccaatcgggtttcaatcgggtttcaaccgtgttctcttatcagcagaacatggttgattgcattaacttgggacaccacttcccaaaaggcaattgccgtcacttcgatccgggattggttgaaatatgatccgtcgttgccgaggcatagtaggagccaaccgggtattcttgattgcttgcttgtccaaatctctcagcaacatggttgtctctgcggtaaaattactttgattcttgcgctctctgggatataagagctgaaatagggtaaggtcgagtgactcacaatcgccgcctgaagtgatgactttgacttcgcaaggcacaaagcctaccgcatggctgattttactcaagccaatcgttcggcaccttatcacatgcttctacacgtgggtcttgggcgtattgcttggtcatagttgaaccagtggatctactatccctatcggattgaggctgtatgccaacttcaccgagtgatcagaatgggactagaaattttcgcttacgaaatataatctatagtgattgatacatttatccatgtgtattgagatggcatgaaaatctccgtactacgtcggtgagacattgatagacctcgtcacgggccatgaggcccatggattcgcactgagttatttcccctctgcctatgggcgggcgggcggttgaccatagccccgtgtcatttaatagtgctacgtattcaggttatttgagtaaaaaggtatacaatggatgtgttcagctataaccaaacctagtaaaagcaatggactatcgagtctaagtgaaattgaaagtgtgatccgaaatgcatagaaattgtgatgcatctgcattgcgtgtaaatatatatatgactacaaaatatgctgaacctacaaaaccactcacaatataatgcctaccagtcgcaccagtaaatttattataaacacgacatattagttatacgacatactaggattcacctttattatgaccaattgtctgctatactggtggttattgggggtaggtgacaagcgatagatttccaagagttgaaccccctatcaggaaactttcataatctgagggtggcatggaccgatggcaaggtctagacgttgaccacctccttcaccgcccgaccattcaccaccacgctcattgttgattgataagtgatgcctcagtgttcatattatggatgggagtttattgtgtgttgtgttgcatgttatctaagatacaagtaggctggtgaacaggtatatatgtgtgcacgtgatcccagcctcattatcatctcagtaaccgggatatttcaacacacatcaacactcacatcaacactcacatcaacactcacatcaacaccaacagttaaacaccacaaacattccaagacaacactcatctctgtttgcctacatctgaatgaaagatgccaatttatattgtagcgaggaagctattagattgcaagctatcaagcgaacggaatgggaaatacgtcctttgataatgaagacgcttcagttgttagtttattattttggctattgaattggcagagatctctggctagggctccttctatgtatccaatgatgacccttcggaacaatgaacagacgatgaagatgttgcgcaggtctttgcttcttcaaagtgcagaatgaataggggataagcttagtaaggtcgctgagagccttacgatcatcagacagatggggtcctgaatattcctcgggcgcactagcaaagttgtgaccctctcttgttgacagccatagtttgccaatcttggattttacgaagggatgtccaccataaggcggaggaactgttgtcgatccaacctgtagaacaaacaggaagaaaattgagcgaatctccgaccattgtaaatacagttggtccagtaattcgagtaatccattgatcattattgttccttaaacaaatgctgttatcagcaccaatcggttatcattttgcttgtccggcgaattctctggcttaatctcggaactttctgtctcctcaaaatcagccaaatggctatattgcaaggcttgctgcccatactaatcttgacctcctgaggatctcggttgccccaagcgaaagggagggggttttgattacacaacgagaagtattccgaacagatagtctttggacacttcatcatgtttatccctcgattatcttatgagcttttcgtccgggttctgatccttgacttggttacagtatattgtccttcaagattttctggtcttcacccgccgcaacgtatttctccagagaccaacaaagaaagcctccataagcatccgcgtagtccatatcgagctcaacccgatcatacccctatcccaatgcttcttaactgccctcccaaagcgggaaccttccaactcttgtggactagcccgtattgactctatgccatgcggcccatgccggatcccatatagtacaggtcccgagttatcaacccacagagagggttgtgtatcagaagatgtccccgattgatgtactagccgatgtcggagtctgttcgaaactcctttcaacactttccacgtgacgccgtactcaaggagcccgataatgcctccagtgaaggatatcaattcttcgaacgatatgtgaaattgttctgtcggcgtgccaactaggtatatgcccgcggcatcaaattggattccgaacatctagcatagcttgttagagtgtatagcgaatggggagatccaataggacctactgtagattttcttttgatatggttcaaacctctccccaaatttaagcattcagccgcgcgggtcgggtagcctcttgctgagaattatagtctcgagcattggcccaaagacacgcgaggtaaaattcaatgtcacggcactaaaagcactggtagctcacagacattgtggtgtgactaagaaaacagtttgattaaaagaattcataccaatagataaaaagcgtaactaaggctacataacgcccgttattacagttaatccacactcttggatcacacagacggccaggaacgacgatcttagttctaagacacaccaccgggtttcaatatgccagataagatcagcattggcaatatacgaagaaaaagaattgccgggattagagggatcacctttgatgagaaaggtatccacagacacggatcaatgtcgaacggatggatattaaggaagagccccggtacttgttggttggaggatgcaactggacccctaggtcgtatgtgattcggttgatggccagcattgtaatccacgcagcttaggacatgcaggagcctctacaccttgaggcgatcaaaagtgatggtaaactggtttcacctttgccgtttcctttggctaccttcgaggcggagaaaatcaagccaggaagatctcatctcgcacaccggctcgattcgaaccaacgtcggttctattggggtctttctcatcgaccccaaagggccgatctagtatctcaggagacaacatgactaatggtatcacacaggagcaagagcaggagacaaatactgttgtgccgtcccgttcctctacccaaaacgctcctgaagagaatattaccgaaggcgaaagcggtgggcgctgtcaaagcaagaaccagatacgtaaagcatttaatgttcaaccttaaaagtgtggataagatggagaagtggagcaccatgagcgaagccgagagagaaaagagatgcagattagccttggcaaattatgatcatacaaggagaagaggcagatcaagggtggtatggaggtcgaggaagaactttgaggcgaacgttggaggagctggaaattaattgctgtgttatagatgttatagacttaatcctttcttcttcttcttccaattttttacatggcaaagtttcctttgaataaatctatggttttcttcggtcttgggcatcagaatgagaaatttgccagcgtttttgtgacacattgaacaatgaagtaaaggacggctattccttgatagtcagtcaaactttgatctccctgatgtgctatacccaatcggatagacttgtatcgagcaaccaccattatgtcgtgacagcagcaaagatagaaaaagagttatgtattgatttatctctcggaccaatagaaacagatcggttgtaaaattgtcgtttgatgattaggctttcgcttctcaagcgcagcctggaaggcagagagaataacgttccatggtcgctggatgcggatagcagaagtgccatccagccggggtcggtcacgatcgttccagtgggttaaagataatacgctgatccacggaaagcaactagtcaagagacaaggtgttagttatactgattaccccggtcttttactgctgaaacatgcgacctttcgactatgcgttctgtttattatgtccgaccagatagtcagattcggaccattgttgttttagagaatcttaccaatacgctagctaagcttacccttatttttgccaaatacccccggcatcgcaatattgcagtattttctattatgtgactcaagtctcgtaactgtaccgccaccatggtacctattagctaattaaattccccggacgggcgcaaccccgtatttaacgtcatttgccttgacgcatcgcagggtaacgaatattttttcatcctcacctctatctttaaatcgacaacctctctgtatcacaatattgcacggccatgatgtgtctattctacccattgaatgatcatagatatattcgtcccgaccttgatggtgctaacaggaattgttttcggggcttacaacttcctagaggttgtggtcattgaacgcagtcctcgtctagcatttaatttcaagcactggcacagtcaacagttcacgcggctgtggaaaacttttggccctttggctttcaaggctctcaggcccagtgtatctcctctggccgcagttgcgaacggtgttgttttggacatcgggtacgtaatctagatacttcttgcatgcagaaactccttacttctacagtaaatgactatgtataggcccggtgatggtcagaatctgacccactataaaagtgagaatatcatgaagttgtatcttgttgagccgtgcgttggattacatatgaggctcggggagaatgtaaagaaagccggccttgacgatgttactattataatcggtcagttactagtttatttatcattctctctcaaggcccttaaccctgacatcatctagcatgtggtgttcaaaacgttgaagttctttacgactatggcatcacccccgcctctattgatacgatcacaaccttcagtgtactctgctctgtgcccgctccagaggagacttatcgcttcctgtactccctgcttaagcctggtggacaatgggtgctcgtcgagcatgttctcgctgatatgaatttcccctcgctcgttggatccaaggcatgttcgaagttgtttggccgacgctaatgggaggatgtaatattaatcgggactcggggaagtacgtgagggaggctgggccctggacgatggttgaactgagaagggaacaaaatgagtttggttgggagatgttagggcacgctgtaggtaggttagtgaagcagagatgctagtagaatgcagtaccgttgaagcatatagtcaacagtgaaaggaagagtatgcagcctgacagccaggatgatgttgctggacgctgccaagccttcggacagcctgtcaatcttctatatagctagcaggattcgtccaatctgaacttcggaggttcccaatccaacatccctcggtggcaattcaaaagtgcggcgttcagggatgcaaatgccatttcaaccttcgaaagaccctcaatcgtcacctgacaagccattcaggggagatgcctcatgtctggagggtacctgggtctcaacgcagcttcttgcgtcgggacaaccttaaagcccactaagcaacgcacgggaaacgtaagggccgcaatcgctatgtggctaccctggatacgatatcatcttctatatcctgaattctgtgggcagctaacgcccgaagatggccgctagattgctcgtggcgtccgagatgtacgatggcgctggggtgtcaactttcctgtcatcaagcacgtgaagcaacgggattggctttagaaacagttgaaatttgttctctctaggactgttcttttatttgttacggattataaatgcctcgaccacagcactgtaaccctctaccctattttctacgaaccgattcgatatgtgtaacatttagttgagcgtagtcactacgaaaagggttcgccaagttctattgacattatttgctagccacaatgacatattaggttatatggagaccgaggccagagtggcccagggactgtgccaaaggatacgcgtaggtcaaacggcaataccccaatcactggccgcctacgatgatgtcaacaatgttattgtgccggcagaccacccactatcggacttaatggccagttggagagatcccttatgcaaaaaaatcatggcttactagtaggttgtctgactttccggctgagtccccgtctgacagtatttagtcgaaggcttcatattgccaattcaccgataggccacatccgaagggaacctactagctttcggatggatagacattgggcgatgtagaaagccggtgctgcgcgtgcaaccacggcatatagtccacacaagctggatgtgcttgaagaagatgtactggacaaagtttaagccacataggcagttctgctgcgtggcaaatatttgccagcgaatagacactgtggtgtggtggcccagtcagcgtctgtcgggccgttcgtgcatcaaatcaccctatcacttacggagtaagctcagtatggtactgtccaatttatgtcccggcccggagttgtgggcgggggtagaatgtatagataagccctggtcgggcagtatatacattggataattgaggttgcacgtgtagggtcccggctgctgtgcctgtcgcgcgcgctctgcaaaagcaccaagatagactagtaagatgttatacccggctacggctttattctaaagtctatcacttgcttgatatcctcacatcacctgtctaatgccttgctgcacagaaagggctgccgactttgatcagagccatctgatcaggatcatgtgtcggctcctaagatctggtccgaaacctttagaagatcttgtcagcgctggcaatgactctgcagacactctactggttgagcggatgggtgcgtggttcatagacacactcgaaatcgggcataatggtatgtgtgctgcgggcggggctgggactgatctcagtggagagaaaagtgatggtctattaactgttgtcggtctagattcgactgctccagactggtgtctttgcttggagttttgggcctgcatgcgagagctctatcatacccacagctgccttgagcctttggtgaagctctctattctccgatctgatctgctcatcgtgccagagaatatcctgggaagtagaacggcctggagatcaagagcaagattgtgacaaactcatcgaaccggcctgttcgagcgtttcgactccgtgcgctgacccatcaatcatttgcacgcctcatcaacaattggttgtgggcgaggttaacgaaacttcgtgatgatgtgtcgctcagctatatggttcgctcggctggagaggtacgccccttttgccgagccatagttgagcactatcttctaggccaggcgcggtgaggcctgtgattttccatgttgacgatggccgtggtcgtctggcgcagctcgccatgccccttcaaatggatagcaatagtagataagagcctcgggaagtgtctctggctgagcagaccctaagtggccaaagatgggcagaaacggtaaaatttgaggtggctggtggcgactcgccgtgcatcccctatcacaggtccttgcctatgcgtattaatatactttctaggtcttctataaccgacgatcaaagacgagacaataataacagctttgatccatttactaatggtggcggtacacatcttgcggtcaagtcggtatatgtaatagacattctttttgtaaacaagggcatgaaaaagcgtgatgacgccgagagcgcagtttatggaataaacaacacggctggaacgtattattgatactcatagccagaatgtacatctatagaatattgcctcttgaatggttcgggtttgttggtggtcttcaacggttgcaaaaggatgaagcagataactactcacaataatattttcctgccagtactgtcaccgtataaccgacgtagcagtcttttcttattctcatttcaacttcctcgtctttcgcgacaatggtggcagcagaaaacgttattagtaggaggtagaattcggtattctagaaactggcattactcattcgatcattcttgccctagaatatatctttgcaatgggtaaccaatggatacgtattatgcgtacaaataagaatctcaaaagtggatatgtggtatgcaataggcggacaaggttagaaagaaaccaaactgaaagtaaacaaattggctaaagaatggtggctataataaaatgctcaaagtatgtaactatatgtgggacgtgaatcgagtggctgtaactagtcaacaattagtaacacggagaaactttgacccgcctcggcaagggccttaccgccattgatgttctgctgttctgcctccttgaatccagggtatgctcaagcctgtgctctgaaatgatgaccactccttgcaacgaagtgcccggcgatataacatgccaaactattgataaaatagttaacaactttgtctctcaatatcataataaaagtctaagacctcttaggcttgccaatacctccgtttccgaattttcgaccgaattgtcgaatcatttgtcggtgttaagtgaaggtggcagtattgcctttggccgcggagaggatttgactagcaacagtatcagcaagagcctagagagccttttctcgattacaataccgtccgtgagggaagggccaccgttgacttggaacagcgttgttctgtttgcaggtccccagttcgagggcccagcgcagcttagggtcggaacttctagcgtcgagctatcagagattgacctcaaactcttacgctctggtaggccttggcggtttctcttcccttggccagataaagatgattgccacaaggaacttcaaacaaacgacacggtattgcaagagcttgttgatgctcggagagcgataagcgaaggtgagtttctggaatttttgtcccgtggtgctgtatagaaagctagagccgatcaatgtagtcctggaacaaatttcgcttgttgagcaacatctccggaatcatcaggacttagtctctcagctttctagaaacaaggaccacgtcaacaaccgaggaggagctctaccgctggatggtgctcaatatgctcttccaaatcaaggtgcttttggtcctgtttcctcgacagaacgagaaagctccggttatcaagattcatcaagcgcctatacgactgtccagcatgctagcaatgaccggtcagttcatccagtcaatggagagctgaatgattcagccccaccagaagttgccattgcgaggaatgacttgcaacgagctggctcatgccctgagagcgacgcaaggccagcactcaggcttcatgcatccgacttcattcaaaatctgagcgagtaagtgaagcatccattggatcgtcaatactgttaccctgtgtactaatatatgaaagaatccttgatgatccgaagaatgaggcagtaatgcgttggtcagaagatgggcaatctgtcttcgttgccccggaaagcagatttcctacgcatatacttgaaaggttgtctactagaagccaccaatctcttgttaggcggctttattactatggatttcgtaaagccggtggcgacttctatcatgaatcctttagtcgcggtcagcctagctctataggaccgaagcaggagatgagctatagcccttcgcgtccttcgcctcctcacgacaatgcttttcaacgtgggcctcggtacaaagtgatcaaaagaaagcgcccaagagaaagtgtttgagagatgtcgaaaaagaaatctcaaaatcaatgaacaaatgatcaaaccgcgcgttgagtcttttcttaggacaacagccaccagggccatgtggttcgaaccgcttactttgcgtgctccaaatcttcgatcggatatgaaatcatagctttctctgcgaaaggaactgctcttgttgccggtgtataataaattgaattgcttaatataatgcaacgtatgtacacacaagcgcgacctgtttatcttccattagtctgatagagtagatgatgttgcaggaggttgactcttccttatatttcctattttcactgctcatttcctccacctatctaacaacacaacgatgtttgatggcaatttaaaatattagcaaatgggtagacagcaactagttgagcgcactatagtaattgcgtggaactaataggtcagatgtgtaaggtggctagagaagttctgacaagacattattgatcccctatctttcggcaaactattttgtgcattctgctcgtaacagttctgtgcgggtttggacggtgatagtttagagtagtaatgcaattgataaagaccgtaatataacaaagttttcaaaagtgattgataactgactttgtctgataattcctgatcaagaagaacacttaatctaaactgtgttcttgtgtttatatttgcggctttcttgatttccgcatggtcagtggctctttcgcccgatgtttataattgataaagtaatattaactcgttgcatcttcatcgatgcaccggtaaccgccttctatgtgcggtttatatattaccccgccgttttattgatgatccaaaccggatcagcgtgaccatcaaaccaccgaggtcaattatatctagcctccatccgagtgctccatgcatgtcttattggttccatgagctaaccagtgacacatactatttaattttgggacaagtataagacaagccccgtcgtcaaggaataccgctccgcacgaattctcgaactgttcgaagttcgcgaatttcggcgaatcgaatcgaattcgaaccttggtttcggggcttcgaatctatggccgattcaattcgtcaaaattcgcgaatttcgaacaggttcgcgaattaatatctagcctttttaggaaaaatcgtttgtggaacgggttttcgagatgcctggcccctacaagaatacttctgcaaataaggtctagaatatcaaacacctgtatgcccaaaaaaaccattactgtgtaactatgaagacttccaacgtgcagcatctttcagccttaataaggtcccaagggtcttacctttcatggagaaacgtcgaatccccagcacatctctcccaccattgaacaatctctcgatatctacctctgctgctggtatagcaaggtgatcttgtgctacctttgccatacaactatattcaagcatgttggccttccaccagtttcgtataaactcggactggctctggcttatatcgaaaccagtgctgattgtcggagtatcgaaatacttgtcgatgtcagactgagcgacgttatactgtgtaggctgaaaggcttccagaaatcgatattcgaagctcttccaattggtgcttggagcggtcgatacaggctgttttatggtggaatatgctttcttcagaaactcccggattcggtcaataatcttctctccatccgatagcgtttttagccacttggtcttgattcgagggtccaggacgcttgcgatatagtatatgtcgttgtctttgacgcagtcgtggtacttctccaggagtgagattccatcggaaacaggaacagttattactggcgagaccttctgccactcgcctcgtcgttccttgatagcgaggagtatagaacggagctctccaaacatacgcgccgccatatgaattgaagggctatcccgagagacatactcggtatattcgttgaagggagctaggatcttcttgatatccgagagctgtctccagtcgttgggtgtgagacgtaaggcttcgatatctggatcatcgttgactgtatcttcgagctgacggcgacactcttcggctctcacaatcataacaaaggtagagttccatcgagtatcaacatcgtagttgatagcttttgtacagccaggtcgattatcccacttctgtatccgctgaggagatcgcgcaatccaaagtacaagtagtcgaagctttgcaataggcgaagtaggagcgttgaccgtcttccagctcctcttagcaacatcatcaagaagatcacaggcttctttatgcgaactagcgcgtagagacctcaatatggttttcataaccaagttcaagatgtgagcaaagcagcggatttgggagttatgggtaaatttcatcgtcccttctcggatgatagtctcggacaggtacccatcgtaccgctgagacagcttttggtagagatatcggtgtagggtatcgttattcgatgcgttgtcagctgtaatcgtcataactttatcagatatatgaaacctctcgagaaccgtggcaacgatattagcaaggttccctccagagtggctgccttcaatttcgacgaactcaatacaagcgcgatattgctggaaggcagaggacatccagtgagcattaatggctagcattggcaatgaattctgacttgtccaaccatccaaagatagcgcaattgaggatgctgaagacattaagattcgaagctcactgtcaagagcatcaagccgaagacataatcgacgcgacacagtatccgcacttggtacggagtcctgaaatcctgcagacctcaacatagccttgaatgaaggctgttcgacgcatgtaaaaggttggcaggttgatacaatccaattcaaggcagcttcttcgaacgggagcttcttttccttagaaatccatgagcttaacggaccttggcaccctgaatggccgtcctggaagagcttgtgtgtttgctgcaggtgctgtttcaacgctgtggttgaagattgcagtttcgatgcaaatcgaaagaatcggcaggtggatggcgacacaatacacaggtgtttaagctcggaccgctccttatttcctaatctccaagtaccagattcaggtgtagtaaggtagtgtttccaaacccagctccgctctttcgacctagtctcatctttctgcttgatttcaatcctctctacctcgcattggacctgagatattgattgcgaaggacgtatatccgtatcaagattcgataaactcatagagacattgctgggagctgtaggagaggttgaaatcggaggagtcggcgacttaacggcggaccggatcgccatcttctttcggggaggcggaagtggtatatcctctgcaaggaggccatatttattaagcgccgcataatcgcgtttattcttcctagtattaggacagtcaaatgttgtagcaagtggagaagtcatctgtaacgttatattagtatgttaagcttgtgtcttgatcgatcgcttaccctcgggcaccctgaagtgatggtttttagtagcttttgaacccgatttggatgttgttcttggtaaaagcacgtatgcgcgaagacacgttcttgtggagtctccgctaactcgattagactatctatctattcttcattaaatgcaatgtgcagctattcatattatgaccctatattaatatattacgtgtatctcagtacgatctatggggtagtataatttgaggcaaaacagcccatttttacgattatcgatttgtggagaaaccttgtgagtcgaatgatatatatttggatgaaggttttgaccgaaatttgcatctattgatagtgccccacagcttcttaatcttaacccctgattgttcaattttgatatcagactgaatctagcctacttatctctgtatccaactatcagttaaccaattattagactacctatatgaggtgttggttgctggctatcctactgaacaacagtgtgattgaccgccttcccaatgaagctttagaacaaaaaagttcgcgatcttcgaatcgaattcgaatcggtcttgaatccgaattcgtacgaatcgttattttcaatattaattcgaatcgaatcgaatcgaatctgccaaaagttcgattcgattcgattcgtgcggagcggtaagggcggaaggggtgtgttttgctcggggttgccgcgtctttggccaaccgatctgctgcgtcgttccctggatcgtcgcagtgtccgggtatccattggagacgaagcgcgattccatttgcttggacctttgcggccgcctggaggatcgcgtggatgatgcgttgtcccgacttgtttcctgggttctcgatcgcttgaagcgctgtcttgctgtcgcagaggatcgttgccgttgttgttccattatgttccgtgcttggccactgatggctgatcttgaacactgtactgacagcgtagaaaatgcctatcagctctgctacgtgaaccgaccaccggtccatcggtcctacttggatctgtttggattcgacagcctgtaggtccttgtcgagtgctacagtagcggcgcctaggtagccttcacatcccgagtcatcagagtagaccacgatggtcgatgtggaccctacggtctctgcccgttctattgccgtctctcggtatccattacagtcgtagtagtagtagtagtagtattcatttacactggcccctcgccgaagcgatatgcagtatacgacaacgatatatccgagtatgtacattgaggatgatccacttcttgacatgaacttagagcctcgtcacggcctctcgtggcccattgccgctcccattgttaggctgcccttatggcgcacgactgcgaaaccgctgtgacgcctcggcgaagtccaagacggcctgaaccgtcttggctctcgagacgatgtctggtttaccttgctcaccttcgtttgcgcctcccagcaggctcgacacgccattcagcgtatccccagttttccgtctcaattctaccctcagctctcggagcctcgggcattccatgagcacatgggcgactgtctcctgcacaccacattcacatagatcatcctcgcggaagccgaatttcttcgcgtaggtggatagccagttgtgacccgtgcgtagctgcgtcagcaggtaggcgcgattcctaggtagattcccgtagagctttctcgtgtaccgcgctggtaggccaccgtctatctttcgtaggtgagcacctttggtgcttgttttccactcttgctcccactgggcataagttttgttgcggacaaacgcgttctccctcgatagtagcggtcggaaggggtgggttttacccggttgcgcggcttctttggcgagtcgatctgcagtgtcgttccctcggatttcacagtgccctggcatctattggaggcgaagtctgatgttctccccttgaacctcggtggctgcctggaggatcgcatggacgatgcgttgtcctgatttattcttcacgttctggatcgcctgcaaggccgatttgctgtcgcataagattgttgctattacaggaaccctgtttacggcgctcgagcgttggtggaacagtttgaacaccatgttgaccgcataaaagatgccaatgagttccgctgcgtgaactgaccaacggtccatcggccccacctggacctgttgagattcaatcacctcgtcactttcgttgagtgtgacgatggccgctccgagatggccctcgcgccctgaggcgtctgaatagacgatgaggtcggatgtggcccgtatggtctcagcccgttcccttgctgtctcccggtccgacttgatttcaatctccgcgaacgcctcggcacgccatggtggtagcggtctcgggtcgatcgtttctagtgttgctagcctagacgggtccatggtcttgagagtttccgcgagggggaacctgtagcgtgatctcatattgtccctgcgtctttgggctcgttgtagggcactccagatggggtgatcgcgaggcagagtgtgtagtcttgcgatggtgcgttgcgctcggtggcggaggcggaggtgggtaggaagtatgtaggcctccacctctaatgttgttgtcgctactgtcctgaatgccgagagaattcggatcaatgaggctctctgtgtcgtgttcagttgtccgaggtgggtcttgtcccgaagcgggtcatgccagactgttgatgcatagtccacgataggcgtgacgcatgcttggtagagctgtcgcatttgctctggacgcaggtgtcgtagcccacttaaagcgatagtgactttggtagcacgtttgatggcctgctgaacgtgttccttccagcggagttcctgatcaaacatcacccccagcagttttgctgtaggtgacggcttaacgtcggctccatcaaaggtaagttgcccttccaggtgctctcccctctttctggtgaggtgaataagctcggttttctcggcggcgaagctagacccggttcgctgtgcccacttctcgatacgagggatgtcttcggactgcatggtggctaggttttcctcggccgagcggcctactcgccatcggaagtagtcgtcgataaatgccgacgcgcctccgtgggagtcgacaggttggtcgaccagatcggcgttgaagaatgcaaacaagataggagagagtggagacccttgggccaatcctgcatgcgcgaggggctctgtctcggtacggaaatcgtcaaatccgatgttcacgtggcggtcactcatgaaacttgaaatccacttccgtaccaccatcggaacccctctcgcctgcaaagagtaatgtaggctcacccagttcaccccgttgaaggcgcccttgagatcgaacgaaattaaagtcaccaccttgtgtttgtaccacgcttggtcgatcgcgttagacagcaccaacaaggcttgctcggtggttcggcctgggcgtccgccgaattggctgttcggcagcaggccgtgcttttctgccagataggacagtcgtcgcgctataactgcttcgagaagtttgccgagtgtgttcagcagtgagattggtcgataggcgccgggaagcgagtagtctggcttgcctggcttccgtaacacaatgatcttcgcgctgcgccattgttttggatggtgtcctaaatctacacatgccgtgaagatgcacaaaggccttcaggtgtacccatagttttttccagaccaacattggtagatcgtcctcccctggcgctgtcgtccctttcgctgtccttagtgatcgctcaatctcaagttccgtgattgggtgccatggaagctccggcagtggtgaagctggtgggcttggctcgggtgtgttcattgcggggaagaacgcatcgaggaacgcctttgctttgtcttcgttctggatgatatcctcagagccagctcgcaagcttggggtgcaaccccatgtttcccgaggcttcatgtaggtcgcggctttccagagttttccttcgcccgcctcgtctaggaactgtctccagtgtgatgctttggttttctcgatggtccgggtccacgctcgccgcttttgttgcattgccttaaaggcagccgcggtgctagcatggtctcgtccgagctccgcgcagctcgtctgccaccttctgcgtagttgattgacttcaacctgttgcaccttgagatccggggtaaaccacctcttggagtatggcgttgggcgcatgtcgggcgtgaatcggtcgaccgcctgggttgtcgctgatgtgagcttctccaccactcggtcgagtgttggccgggtcttgatctccttccatgggctcatctgtagggctacttcttcgccggttttggaccagtccgccctctcgtacgctttcctcgctttggttcttagcttagtctgaggctgcaaattccattctgagtaggtggcgcggtggtcagatccgtagttctcgtggtacagatgacatttgacaagcagtcccgggctgtctgtcactgtctgatcgatggttgagttttggcctgggttgttcaaggcccagtaagttgccgtgcctcggggcaggcagccttggaggttgtgagtctggaaaaagtcgattaagtcgctcgcgtcttcgataaacctgggcgcgatgcgattgccgccccacatcggatggtgtcggttgaagtcgccagaaacaatgatactggtcgaccgatgctcgttttgtatggcagctgcgatggagttctgaatcgcagtgagagctggcaacgccgatgcgtcatcgccagtgaaaagtggtactggcggtatgtagatagaaaagagaagtatttgagaattagctgtccagatcttgatggctgcgatatctgggtggtcgcatgatatttgacggtgtgaggaggtggagattcgtctgttgacgtagatcaggctgcgaaaccgatcagcatcgagctgtgcggcaggccgatatagtcgccaggcgctgtgattgacgtgtgtgcggtacgtggttatggagggctcctggatcagaagaacatccagatcttggctttgaggatcgttgatcagtgcctccattcttggtctcacctccgacgttagatgcacattcaagagaagctcattctggtggcttgctgcaagtcaggaggttcattgaagatcttctcgtggatctcagtgagaatgcgagcatctgcgcggagggtgggagatatgttttcgctttggatgagaaagcttatggtgcggacgaggaggcgcttgagttgctctggctccacgagctcctttagacacgacataaaagttgcagataggacaagcatattgccgaattgcctgtgaagaaaacatgtaagttttgcctctatgttcgtgattctttgagactagggtcaagggatcccttacgcatgggcagtcccgaagatgttggtaacgaccaatcgatgtcctcctatcccgtcaaaagcctccgtgctcttgatagccgaactaatgcagatatagcatgcagctttcagcttcttcggcagctcgtgtaatcggacttcaggtggctgccagtgagtggagattgcggccggagtagagtccatgtcactagacatatacgccatgctcggagcgcgagcggcgctgtgcagtatagagggggacaactgttgtgaggtaggcgattccattaaggtctgactaattggactgacacgggcacctgtatgaccgtagtgtagtgcgtggtagagaagggggcggtggataatataccgggcaccgtagtacttggcacgcatgcgggcagcgttaatttcgtttgctgggggatcactttcgtcccattgcatgctttcaggtagactttcacgccagaggtcgaggttcagacttagagcctcttgaacggtggatgaccatcgtgtctggccttgcttttcaaccttgtataagtctgtatgaactcgattcaagactttgcgtagatggatttgggctgaataaaacagcatcatcatcgtttcgggtgcggtgagattgtttggcagagctattgtccattttcccttcggaataggtatccgaccttcggaacgggagatgccgctcgctggaatatccagctctgcgagaagatcactctccagttgcagacaggtccagtacgcaaaatcgtacaagtccttcgtagctccctcattgagttgctcataccgcttggttctcacaaggatctggcaagcccttgacgcctgagaaatccaactgtggctctggaaagggtgggacaactggcctgcataaagtccagcaagcaagccgcactgaacatgttctagctcatttccaccctgcagatggcccagtattgcggttgcatatccatagagagtcaagccagggatagcctggtagttccttatgttcccttgtttatcccgtgtatttgtgacatctctccttgacaaaccttctataccattgttggatgaactgtttgggaaagcttggccgacaggctgggctggtacactatagagaggattcgaaagcgacgtctgcacggccggtgagtcagagctggcggggggaagcacaccattagcatccgtgacgtatgtcgtaattgcaggcggcggagaaatgaatggtgtcagcggagcaggaatatgctgattgaggtagtcaatcttcttgtccatgatgggcccagggagaggggcaggagcttcacaaatggctccgagggccaggcacagcaggattaaggcagtgtcaatgtttttaccgacaagtgggcgtagcaggttggagacagtctccattaactcgccacgcacactcaggttttcatttgactgcctctttttggctggaggcggaccatcacgagccggtcgagcgtagctggaaacagagcttggtggtgaattattgactcgacaatagctttggataaagctatcgaccttaatcctaagttcaccttccacaaggaatgggtggagcttgaacatgtgcttgaagtaactatcatagtagcgcctagcagtcgtagcatccagatccaagtttccaaattcgtcgatgtcaacattgacgtgctctcctgcacctttcacaccgggttgagcacctttagactcgcaatccattggtgattgactgttatcggcagtgtatgagatctcgccttggccgtatatgctgatgagaccgcgctcttcttccaaccgcatgacatagtcctcatcatatctttcaggatgtatcagcctcttgattgacggccacattaatagcttatgagctgcagtggtgtgctctaccgggatggagagctctccctcggcctccttctggaggaacctggggtccacggctccaaactgttggccaaaattcgaaccgtttacatcctgggtctgaggcatcgctgctttgagaggcgagtcctgcctgatgactggtggtggtgggagggccggatgtccttgcacagtcggaggtggatgtctaagctcttcagccaggttgaaacccacttgctcttgcatttgatcttgccattttgcaaaatgctcatcgatgcggttggctcgctcctccatgcgactctctatctgggagagccgatccaataccagctgagtagtcttctcttctttgtgcaacggcatctcttctttgtgcaacggcatctcattgtagacacagccaaggttgtttactttgcagtgactgcaacatggtcgtccctcgtcacactttgcttttcgagctcgacattgatcacatgcctatatggttagtgtgttagtgggaaaatctcccgaaacaagccctccttctactagcttaacatacctgcgtagctcgatgtgccttcctctgaggtgctttaagcacctctctttggtaagaactctgactgtacccgacatggggcgtatctttcgccatttgggtaacataaattgtggaatctgatacaggaggcagacttctcgaaacgggtatatgttcagcgttgttggcccgattcaggagcgggtagcccatgtgagcgtgaaaaccaggtgagccctcgtacggcgcgcccttcattgactggtggaagttttggtaaggaactgtgtcttgcgcggaatctgtgggcggcgcatatatgggtaggccatgaccattcgatcgaccatacatgctttctgatggaagctcacggttatgcataacgggatattctggtcgctgcagcggacccatgggcgcatggtgcccttccgggatagacatatgatccattgcaactggagagcccgggtgtgcggggggttttgaagttgccaggcgcggcagtcttgttgtattgtgcaactaaccagggtccttgacacggagtaaatcttatgcacccaatttactgttgagaaatcatttctcttcataaatcgggactccaaccaacgtgacacttttggttggaatcagcgaagttagatatagtcaacaggaggggagcaaatcaatggctggtcggttgtggatctaatctcagaaggagcaaagtatgaaccgtgagatagtgtggaccctcgtaaggccgccgcataaatatggcaagggaaaaggacgagaaaatggagtgaaaagagagcagtgtacacaagtattttgctcaacatcaaataaaggtacaaggctatactatacggaggggaatatcgtgaggtttaaatcgaatctcacaatttatacttcttccctatatagatattacctacatgctccttagctttgtggtgactgtcagatacgtcgaatttaaaatttgaaagtaaaaaagcaagtaaagaaaaaacttcggtttttttctttcttttttttttttttcgacgaattaattggtaagggtctgtgtaatccaaaaacgttatgtctgatcgccctcgatcaaaacgaaaatgtctaggcatgacccgaacataccgttcgttatacatttaccgagaatgataccaacaattgtccaatcaactgattgtaaaccgccacccttagccccagcccccgtcaactcgctttccaccctgtggaaccctttccattctatcgacccctttccaccctggcgacccgctttccatcctgcactcgctttccaccctgtcgacttgcttactctccagctcgctctatggcggcaatggaggttttactacctgtccatggaagccataaacggtggacaagcggttacgaggagattgatgatctcactttacgccgactgctagtggaggtcaatttcgccttaaggtctatcgaatttgaactctcggtgcgggagattgaaccaagcgccaggagcaccaccaccaccaagagcacctcggagaacacactggtcaagccgccttatcttaaatcccaaaaggcaaaagagagaatgacacgtcgtgaagacaaactaagtgtgatttatgggaaaattcaaaacacggctgataagattaagcgaaatgggctgtctaatttcgccgttgttccgggatccgaaagagcgcagctgttgatcgaggcgctccgtattataatcgaaaccagtgtgaatgctgcaatcccaagtcatgacaattggacatcggatacgcatagtgccatgctgtggatgataattaaatgtgccggacctgctcacatgcttttagttctgcatagcttatctccacgccagttccgaaagcttggtgttcatgcagctgcgagattgttcagcacatggtacaaaatcgaagccagctatttgtgcgccccttgaaaaacaataccacgacctttcggttggtagggctcctaatttttttcctcggtagatatactaaataaatatcgcagatcttaatcggtgtccaaataagcgaaaaagagctgactccaacgtaagttgattgcatgtggatgaaaacagccccacgctcacattagtcggtgcaagtcccatgttgcagttgttaaaattgtcatttgggaaacttcagggcaaatacgatggcaagcacgatagttggctcttggatggttttaattcccttggcgcaaaaaccactcaagtgcaacagcagtgccatataatccaccgtgatgaacggcgacgaaactttccctcgagtaacacagaagctgaagtgcacgaaactacaacggtagaggacgacgacgacggcttggaagaaagaagtaacctgggttcgacctgctcacaagagttaaatgatattcatcatgcgttcgaacccaagaagaacgaggtggtttctgtaacatgtgataggtcctcagccaggctgcagtgcaatgccctccaaatgagcaacgaaaaccaccaactccacatgtcgcatgaccaatcacagataaacacttcatcggtctacaactcgggatcaatcatatccccgctgttcgatttctcaggaggtaagtatgccctggtcacttcgaacccagtgtatttaacaaagctagattcggcacccaccttctgtacagggatctcgctcgaggatacttttaaccggaattctacattgatacacgagagaccgtatgattctgaaatatttgctgtaatacaagatggagatgttccggcagccatctctctcctgggaagcggaaaagcatcgattcatgatgtagacccctacggtcttgggctcctctacgtgagtccatttcacgctttgcacttgaatgcttcgatttgttgatgataagaacaattagtatgcgtcttactactgctggaaaggccatggcgccagcaaggccatgcacatatgctcctggttgatgtcaattggggtaaatacccggtggactgacgatattggaaagcaggtttcatctacccggcgagtttagtatgagcattctaattctgtgtttgtagtacaccgatggagtcaatgcttgattctgcgttagtacacaccgcaatgtcaggtggttccgcgctagaatttggcaaattctgtgaggatattggagtcctcttcaatatgacacttagcgaaatcgggatgcaatacttgaatacccggggcttttcggagcttcaccaggttctgctccgtataacccacaaggtgtcgttgagtgactatcttcgctcactggaacgagatactctcgataatttcatcaaccgcactgattcacgcggcagaacaccgctcacttgggcagtggaatttggctggtctgatggaacgcagatcctgttggactatggtgccgatccccaccgagccgctacgactaatcgaggaagcgttactctactgcaccttgccgttgctggaccaaggtctcaattcttgagagcaggctttctagaggtcattgacattttgcttcagatggaagtggatgtcaatgcgagggaccatgagggatggacgccgctccacattgccgcatcatgggggatattcgatctccgaaatctcttcagccagcctgcattggactggagcgtccttaccaacgataacatgtctgtggatgctttgtctccaatcgagcaattttccaatgttgcactagctagaatttaccagagctagcatactgaaacttccttcagggcagctgttcatgtacattttgaggatattgcagcccttttccgacaacgtgtcttcatcgtcttccacggtacatcggtatattggccccgctctatctccatccaattcgtagagacaacctgatctccttaccaaacatatatagtgatgctcaacttcggactcaggagcaggaggctctgaagaaccactcaatgcggcattgcgatagattgtatccaattctgctgaattctgcaggtaatgagtgcggtcggctgctgtttttttcacaagacagtcaatgaaggaaccgggctctactcattttagttgatgtatatgccacaaggggtgaagcaggatatcataccaatttcctcggtgcctaaagtgttgcaaacgcagtgcaatatggcgtaaagaccgcaggcattgttgatagtttgtttcagccagagaatgctttccttggaaatgccgtgttcgattttttctgcatatgcaggacagtctggcaggataaggatcaaggcttcgacaggattttggataccaaaacgaatgttatccaattgatctggttccagagaccagatatcaataaatttgaaatacttaggagcccccatattgtgcatcaaactcgtgaaaacctgagggtccgattctagcggaataaagtgtttttcatactccatctcgactcgctggcaattgattgtagaagaccaatcttgatgaaatttgttgtcactcttgccattgggatgacggctaagcggagataagtgaggcggggtaaaggattgagtgaccccacaagtaaaacgcctactcctaatcaagaaccgttgttctgtacatcacgtgataatgcgttcaattatgttctttctaaattcaaaagtgattcctgtgtggacgaggccgtgcctagtgatattgctatctatgcgaagaaaaattatctttataaatacatcatttccgttccgtgtaaagctgtcatgtggagaatgttcgtatcgaatagtgtatgcggcctttttcgcaaatgccggcaagtaggctcttcaaatccaagctcgacacaactgtgcacggttggttggtcacgtctagctgatactataatgatatctcggagctgctctttcggccaatgactatcttcgagtaacttcacaagtgtctcaagatctctcaatatcggctgttcggatctggcgcagatcgggacaataattcgaagctatttctttggccactgttcctcgaacagtgtgactaagaggccaagatcttgtagagatggccttgctttgcgttcaaggaagccaatcagagcttgaaacaggtcccatcgacaaaatgcgaacgagaccaaatcctccgtggatagataatctagggcatcatgcagcaactcgatggggagtgcgagtatatttgcgggatgatgggcgtcatggcttcgcgcaaactcgctttggtgttggcgttggaagttctcctggttttccacactgagaccatgaacgctctgtattgggtgttggtttgtatctggtataggcgatatcagttcgcaggtagccgtctcgtatcgttatggaaggcacatgagtacattgatcgcaatttgttccgattgaatcttgttggactccattataccttctcatcattttttagccttcgaaactaactggccattagaaatatacattatattctgtgggcctgagctatgctagaaaaattcaacgaatcgtgcctcaactcctcagcgcgccactggtcatgatttgacacaccccggacaaagatctaccacttgtatgcggtctaaaagcatataataatagaagacccgactgttgggcaccactgatgtccagtgcggcgagaattgtccggggcttttacctgcgttgaggcggacactgatgtacagactccagactatggccgaaacttcgaaatcggaccagctatgttgttcatcgggcttgataggccacttttattggttttctattcatcctcctccttttttaactaccctaaatttgaattcgggttgccaacaatcctcagtaacttgatccatcgttgaatataaaaaaccctacctagcggacgcaaataaataaccatataaactgattatatccatcacctattcaatcgactattccacacaggcccgttctatcatacgtgagtagtgtacagtttgaacacttgctatataaagcggacgatcccgacatatatagaagttcctatctttccgcttccctgacgaccaaacaagcctctggtatctctttatatggcttttttgtagccttcccggggcacctacaatcactatggcaattcctcctcgctccatgactgtcattgatagcgaatttcaacacctaaaaggcattagagagatatgctttgatgaagacgtcatggcgtttcttcacgatgcacaggcaacgctcaaataccaagggatatacaaccaacgaggaccttttaaaaggtctctcattcactatgctgcaatgggtgactgtgctgagctccttctttatctcctacaagatgggacagcaaaggatgacctagatcagaacaagaggacgccgctctcctgggccgcgcaatacagtgcattgcgtgcggtgaagcttttgctggacaatggagcggagatcaattccatggacaatatgtacacaacacccttgtcgtggctggtacaagcgggtaggggcccgaatcgagcagctacaatgaattacctgagaagtaatggtgcgatgaggagaggtgcaacacgggcttcgatcaaacggaagatcatccaagtttttccctcgggtttgttatagtagaactttagcttctcgacttctgtgttaagtaaatggagcatctcttgtttacaatcatatgtggactgctctgtattctctctgaaggtttgcctactcgttgacaaggaattgatccagtgcgtatattcattatagtcctcctggatccattgaacgggaatgcattgcaacaagataaagtgagcaaacggagagcgacttctattctattctgtcatggcgtgaagaagatgaagaatgcaaagaagcaccgattgaataatgagatgggagcgggcggtactttttgaatgaactggcaaaggctgcactgcggttcccataaaggcgcgctaccgtatcctgactcgagaagaaccctttcccacatgaaatgcaatggaacgtcaccgggatttgtctgatgtacaaaagaatagcacccacctcaggctgcctactcaaacccgtcgagcttgttaaggacaaagctctttgggttggctcattcacattgaacgttactttacttgaaagatcattaggcatcgattaaagtgataccgctccaacctatctgtcgaagatgccagcgataccgtggacatgcgtgctcgtgagtaagaaatctatatctgtctttcgaatatggtaggcctctgccgtggttagaatatcacgaagtgcatattttcaatgctatctctatacagtaactcgttcgaagcgcatcggagaaaaatcgtgtgtttacttggttaatgccaagggttatggagaatctacagaatctctaccattgtggttcagctagatgattagactagctctaaagcggcatactaccctacctcagagatatgtggcatagtcactagtaggcggagctagcactaggacattacgacatcctatttattacataacaagctgacttgctgttacagccacaatagaatagacaatcaatgtgtcgtcttatcctgctcccaaacatcgctcaggccctttgccatactaaacaaaatttccaagacctagtactagctgaaacggtcaaggatatggccagtacaaataatcatgaactcaaagccttctagtagacagctcggggttgaatgtgccagccccgctacgggctaaagtggaaacgagtacgtgtacccttaccctacagctctggatcgccaggcaagactagggtttttactaatgaaatagatatccgcacatccattatgctgaaataaacttgcttgctttttatctctacttcaacaagtccaaattcacatgaaagaaagacaacaatagtgtgaaatcggatggtccaacctctcgccgcagtgctttccagctgccccagttatgatgttcatctaatatacgtattggtatagtatagaatgggctttccccatgtcatcgggggcttcagatacgagggcgaatgtatcggagtaaatgagaataactcaaaacccaaacccaggccgacttgatgcctctcaatttgacttctttcgcgcccctctctcttagataagcctcagtggccgctaggtttatcatttcagggttgccggcgtgtatcagccatgtcaaaggtgtgccaccctcataatccaaggcattgaggtttgccccttgctccagtagaatattcgctacagccaatgagccatattcggcagcccaggaaagtgctgtccgcccccactggtcacgagaatcaatatctggcttgctttgcagaagatatagaaggaggtttgtacagttccccatagcagcgtaatgaaggagagatctcttgtagcagtcccgttgcttgaaacgtcctcgtgactgaagcgatgaatgagctttttcgacaaaagccacaagttttgcattgagagatattgccctgacggccttcaggtgatcaaactcggggccaatgtctgaacagccaggggtaggttttgtccccgtcatggcaatcgggcttggagggattgggcttgggatgatgtaaaggagaacccaaaaggtcttggtcaagattcaatgagaagctcgcagaggtttataaaagtggacttgagcaaagaggaagaaattctcaggtcgcctcgaacgcaaggcctgctcgcctattgagtgatttacaaattatcatatgatgaaaagcagtaggggaggagtttatagcattctaggcatgtccagtcacttaaaagatctagttgatagcagaaaatgaagggcccggggtgcctaaactaattgagacctgttgaaagccatgccttcgaatttgtcacccttgtttgtaatttgtggctggctcctaggatctgtgaaggtttaaacactaatcaagatgcagagcaaatgaaactctcgcaagtgacacaaaatgcgctaagggccggggccgcatccgcatctattgttgggcaagtgttttatttcctggatctgccacttggccaacccatgtacgtaatccacctcagagtaataaatgaaaacgtggcgctgaaagctgccagacttccatatacacagggagctcggaatgctcgaattgcgtcaagtccagctgcgcctacgaggcgctctagggcctgctccgtggtctccgccttgaagctctcggggtcgcaggtgctatatcaaatcactaacttactaatgtggacaagtaggaatattttctctagcttaaatgtatctagagttagtattttgtgcttcaccgtactccgtagttctctacctataggacctgcagggttttgcctcggtggttcgccccgctcgccctctaattagtgcccaggcagacgggcgccgacccatcactgcctccagaagttggtcatgaatagaaacatacggaagtgagatgaatttcctatatctaggggcttgttattgcgtcatgattcagccgcgcaaaaagccacagtaaaaccagtaaaatgggcgactggcggagtctcatttgtgcttccaggagcgctagggcctttgccctcgtccacgatagcttggtagtgtcgtgctgatacatttaccgagtattctcggataaccacctttgtcggtgtacgggtggtgactggggtcagatcaacgtttacatcaacgttgaacatgaagattacttaacaccaacagcatgtgcagacagagaatacctacttgatctatgttagttacctactcattggcggtatttggttagatttcacagttcagaatcgattcttaatcggctgccttggttcaacgaacagtaagggttgccttatggttggaagcagaccctaagctagctggcaaagaaatacagtaagctcaacagaaatgacagaaaatggggatttgtcttcctgtggaagtgttcgggactttctcaatcaacagcaaagaaaatgttcctcgagtatagcaaagtgatgtatcggaaagacgaaggcaaactctgtctgtatcgaatatttttctggaatcaccacttgtcttgggatatgctatgcacaatccatcgtcctggagatgatgatgatatattggccccgtttcaccggatagtagatcctacgaatacacgaagtgatttctagagctgctttactaccaagtatcaggaatactttccgtggccgtcgatgttgagtacattcaccttttgctagatcaattcacccatctcattcgagttaggcttttcctagctagtagagggccgagcgtatttcaatagatatcacactagactacctctgtttggttgtgcaaggatcatgatatactattggtataataccatggaaagtaggcgacacagatgaagaaagtcaggacgacgaccctgttgaggagcagcggaggtttgaaaagacaagaaaattgttctggcaaagcccgagaaagaagggtggatctaacctattagctgcacccccgggcaaaatcagcttcatgtcttccgttaccgaggccgtttgattcgcctctatcgcaatcctcgtccgagtctcagcaatacttgacttatggacgctaggactagaccattcatgctcggggaaagtgaattttgatcgagttgctggaagaagcgcaggaagcatatctcaaacgtaagggcagtaaagtagcaatttaccgcggcctaaagttgcaaaatatgctccgttggtccttgagctcctcagggcgaagttcgactttgtcagagcaatagactatcgacacttcttcatttgagcatttcccgatgcccatttaatgagaggatcatggagtgagctttcgaatttggtatcgacggatgcggcaaaatacaaaattagttgctgcaggctgttataaagctgaggaatggcgaatttgaaaaaggcggagagcaaagtgaataaaagaacgtaactagagcaagttgacacatcaacacgagaatatagagacagaattcgagtggagatggaaaagccgggaatcaataactcgagtaccgatggcagcacctccgacaaggtttcgcttgaatgggcggccattctttacagagaaatcgggagaaataatttacattattttactagctctgggcttccctgagtaaaatatcatttgatcgatctgtcagttctaaataggccccattgcatcctcacttgcatagactatttcttcggtgtttcaagctaccagctatagacagcggaagagccatcgctaattacctgaaagggaattctgcgaataaccctaggcctctcttctttgtaaacatgcattttgaagctaagctattgattgaccgctacatctcgctcccaactgtacctgtagcgaacactacccatgaataacgagagactgactgacaaattcttcgcatatcagatagaccattacattacatgacgagccttggctactagaagccatcgagaataacagagccagaaggggactgaatggaagcccagtaccctaactagtattcggcgccatcttcaagggcaatctcccttccaccatgtgattgagaagcggagaaaactgtgtatcccgttctcataaccctgcctttaacaagccgaatattgggaggtatgtgagggagcataatgatttggctatccatgttgccagctggctgtatagagtccgtctgtgatatgtctacgaaaaagttgcagagtgagaaggaaatatcaaaagattcgcgcttgtaggaaaggctcactatgacagtcttcagttgaactggttcttgacgcttctcccttcttcgttggctttggactgcaaactggtggaggacttctgaggctagatgcaggtttggtattttcgggctcatataccgcaggttcattcagtgtataggagccggcagcatttgggatcgtttgctctattgtcggtccccaaaatgcccgcaggcagtttggtagaagcaatcgaagagagacagaagacaagcaacgcatgagaccaatttgtcaaagagattcaaattgtatagacgagtatgtgataaaagcatcaataaagaggtttcaaagttaagcaggggtttctttattcgaaccaggaggatatatagaggcctatttctacttccaagataaccttccatcgcacattgtcattaagcagatccagtcatggtgagtacccgcccctcgctggtgatgatgggatgttcacaacagaagcccgcccctattcccgtccgaatcctgtatgggccggcaaaaattgctttgaaggcaatgctctccttgagatttcatctccgtcgctcttggaattgaggccctcggaaacccttagcggagatattagaaagttgctagatggctgcaacactttgagaagcagagaagcagaagatcccaagaatcctgtcacgatgagagcatttccctcgaaaatgacgtatacgtctacgtgcgggagatattacccggtctcagttatggtactgttctaaagctagtgctgatgacttggcacttggtgcatcatcttctgaagcatcacagggcttgattattttcttgagatggccttacgatagtgaggtgaagaggatactccaggattattatcgaagcataaagtgtgaaacgggctcttcaaactcagtctttgtgcttgtcctgaattgagccccatttagtggttagtgcaagtgcaaaacatgaaatgaattatgtctgctttgctcaacagtaaccgagatttgtgagacggttgcaaatatctgcgagacgtccctcgtaccagtcctttaaaacgtcgtggatctcatatcccacagcttttgcaagattgcacctttttgcatactcctgcaggtatttagaatgcagctattggtaacaaagcgctttcttcgagccaaggtcttctgcctgttgttgcaagataatcggatcaacgctgctcagaggaacgaaacttgtcatcccatactttcccaagactcgtgaaataccagtttcggtccactagggatgtttccttcgtgatgcccgtgatgccatggtcatcctgggcttgatgtcgagcgccaagctcttgaagagcaatggcattgaaaaccacatcattgagaccctttcttttgatgtcttccatgagctgaagaccatctggatgaagccaaactcgcatggtcttgtttggttagagctctgtagcaatgacgaggtaatggtaacccacatgcaagcaacttgggggtgagtctctggtaaaaaaacaccagagcctgaaccggcaaagatgctaggctgttctttgagcatacctactctcaaaaattcattcaacggattccggttgggttgcggaccaccgaacagaactgtttcgcgcgagcttcttggagggaagagtcgggtcatacaatctgtaaacaaacaacgaagttttggtatactcaaacagaccatagttccattgttgctaaggcaccagctggggaacagcagtgtctttatatcacgatcacaattttgacatttttttccgcaagagttgcaaatcaactggcaagagacagccgaagtgaagcataatttctaagagccttgcccgtttcccagtaatcttgtaaaacgtacgcccggaatcttcaaaattaatcgcatcaaaattcaagtgtttctttctgaataagccatgccatttgtttgctgcccaatattcttattgaagtgatggtgatcacgtgatggcgcctatcggaggggtcagcaaaccccgccatttaccttgcttcatcccaccttgtcttcctctcgcctcactcgagcttcagattctcctattgcaccaatttatcgcgaggacaaagttgtggggttgcgtccaatgcgcgaaattacgatgtcgcaaccgacgccagacaaaacacatctctgggaggatgacctgacagagggtgcggacaaagaacgcaagagtttcgcggaatgggcttcttccgtttcgttcaagcaacaagcggaggattttgagatatatgattcgaacgatttaagcaccagagttgagccttttcttcgagagctgggattacttggcaaggtagactgctttctcaaagttagagaacaaggctaatagagctaggcattctcattggtacaaatacccggacccaagttcgccccatttcggcatggtgcaggcgacgcatacataattccagtacaaatactggacggtactccgaccgtttcagggaggcccctccaagaaggcaaaataatatacatgaaggcaaaacaggaagtaaggatcgaagccaaagtgcgcttgctctttgtattgctatgaaacagattgctattcatcgggttcgaaaatatgtgcatcgacaattggtgttgctggatgagacgtcggattgcaactccccacagccatggcgtgggtggaaaccacagtggacggtgtgagggatccagactgacgttataatcagaatggtggaaccttcccccctttggaatgtcgaaatgaaggctagatcatgcgcgtggtatttgaatccaaagggagatgagaaagcgtattttgtatatcaagttgaaattccgaatgtggtgtcgatctgaacaaagaattgggtgtggccctggggtttgtggaaatcgaggcgagctcgtgaggaataatttctgggaatgagagaccagtgtaatcgtgtgtaacatgatttggaaccgtggagaattcagccaattcgtgagtagctgtgctctgagttgatccgggggctggatcatcgacacggaccgcggaaaatgaggcatgttgttttagggcatcgtggccattttgaggaacggttgagaatgaggagagttcgtgagggctcattctttgaaagaccgtgccattagattggaagctttgtgcatgggtttccgaggaacgagcattattctggtcagaggaataggtgcctgcctctctagcagtcacgagtggttgcgtgtgattgttttgagcctgcaccttctgcatagatctccctggattgcgagaaatcaattggaaatcagaacttatgttcttgaaccacaccgagatgtccttggctgcgtccacgaatacattttctttttcttccagcagaagcgcgatgatttgtggcaaatctgcgagcttcaagcattggaattgaccgtattcaaatattgtggccatcgcgactactccctggactgctgcgtgaccatcttgatccttaaatgcatcactcgtgagtctctcaaataacaattggttaacacccctgctgatcccctttttcagcacgttgtgatctgattgcggataaccataatctctgatgtaccgggttattttgccggaccgattgtttccgatatgttgttggtatttggcatttgtggaagctcgttggaggttgtcatataactcgtcgaccttggccttccatccccatttgcgctcccattgggtgaattgttgagcgagtgaaatctgactcaggcctttcagaagcttttgctcattgcttggagttttgttgccatccacctgtttcagatggtcgactctcttatctcgatattgagtttcttgctcgtcatgtaagatctcagacagggatacttgtttcttagaaaactccaaaatatgagaaaggcgttgttttaccctcctcaatagttgaatggaaggactgttatcgagtgtctctctctttcgcttccgcgcaatgtcgtgaccggattggatagcagaggtaatgacggggcgctgaaaatgcaacgggttctgagcgtcaatatgctgtgatgaaccatgtgttgttgaggacaggtgtctgatttcagcatcagggatggtctctggaggcgaatgggccactccgcattcaaaagcgttaatgacagtatcgacattcgccgaagtgtcaagaatcttcacaatatgccttatagttttggtcgccagctcacggtgagtctgaatgatttcactaggagtattgcacagaaggctgaaagctgatatagcttcgatttcttgtgaagacatgatttaattttattgagagttcctcttgaactcgatggggcgggccagatgatccagaaataagggttaaatgcggggaaggcagaatcggtacctccggagactgaccacttgtagcgcagcttctgggccgtacgaaagtccactggtcatcccaggatcaacggaagtgtctctgagatcggtaatcccctcattttcccaaactaaggtgatccacatctatttttttgctttacacatactacccctagggctctattcgatcctagaggcactttgctcgagcctggggacccacagtttacctccagcaagagcttgaggtaccaggagcagcaaagttcccagagctcgcctatacgtccctaaagtcgatagggcctgtgtatgaaacatcatattatgaaacttcttgattcatacttgaaagaggtcgatcacagagactgccccattggctctagggcatccacgaactcattctggggtacgcgctcacctatcatgaatagactcgaactggctatttcgtgtttaatcgagcctcaatttctgcggaaaatgtgacctctcaccataaggtgcttagccccattcgagtctccaaggtcaaaatggggtgaaaagaactatatttggactgacccacacttcaaagtcgaagtgtgggtccattttcgtattattggttagctcattcgtacattattgcacccatgccgcgataagcagctgaaaaatggaacgtgagtgcgagaaacaccaaaaaaaaaaaaaaagaaaggctttcttgctgtatagagtacggaaaaacacccgattccctcgtagctaggaagtactacgtatttgcataccatgtgtgccaatcaggggctccccgcaagcgccgtgactagtcgtgtgttgttgatcattccaatggcgcgtagtccatgagcttcgcttcgttggtcggcgccaattgcaacagcggcacaggtcgacatgatagagtttgcgaaagatcgcttctgcgatactacctaggtatggggcacacgcaacatcagagcgcttgacggcattttagtgctctttagcctgaccaacagcggatagtacttcactctcactggtgcaactacaagtcgtatctcttctattggtttacaactactgatgcaacagctttgtgcatttctctcgtttcaagatttccaaagtcatttctccttatttttcaattttgttgaacgctcatcgggcgggcataatacgattttaaattgtaaaatgataggaagccgtggatataaatacatataaataccagaccttctcgccagtctttttcagaatggtcaatcccattgatacttggtttcacacagcagtctcctgtttctccaattcggtatgtcgactcatcccttttgacggtcaagactactgacaatctagtaccagcaccaagtacaattagagcaccgatttgctacacaagaaatagcaaaaatgtccaaggccttgacagaatttgctcaactggcgcagaatgtcaaaaatgcgccgtctaagtttacaggcgccgccgccgaaggcagccgcctcatcccgtcaagaaccaaggacgcgctatttcaattgcgtgtcgacgcgggtcactacaacgacaaaacaaaacatctcaatgtgaacctgcaggtcaattcccaagccaagagccctgcgctgaaagactgggttaaaaaaagtacaactcatggaaaacttgcgactgcaagtttcgataccacggccgaggacaaatatgcggaatatactcgggtgttgaacgaactggtgaaatcgggcaaacagaagcttggataaatggtttagagcccaacgaatctcgtcaattgggatatagggaatttacaaggctggaatgtggaatatagataacagggattgaggggagcacaggggtgagggagacttaagtgagactatgcaattgatatctttctacatctagtaaattcatattattgatacttgtcttttgctcatcgccttgtgttagtacagcaaatgtatggggtacttacaatgttatagtgtaactagtgagtgccaaagggcccactactgcttatatcagccggcgaagaattcatctaataactagtaatggatgtttatgactcatgtctacagaagcgtgtaagggaaacagagcttcgaaccatttcccacaacggatactcttagtggaacccccgcccggcctcgaccacaaagacccggttgccgcgccgaagttgcaactattacagctactacctatccataacagatttccattatggttgaatctcatcctttgatccttgctccctctcttgcacgaggagcatgatttaggggtgtgggtttgctgcggaatcgacccatgtacctagactgcacttcctttgagcgttttcctcctcgctggatattccaaagcatatttccctaactaatactcaatgtaatccaactacagtggggtttcatgagtatttgcatcccagtactccccgaaaggccccagcccaccttcctttctgcttgttaacaattgattcaacgcgttaactaataagcagtaaatagaaagctcacatacacgcttatggatatatggtagaagctccagcttgtgggctataataaaagagtgtacaggaaaagcattaggtggaagtactggggtgcaaatactcatgaaacatgactgtaactagctagcagttagccgccggagatgacgtatccggcacggtgtccagtcttggcgaacgttccaagccagtgggccgaccccttccgattgatacaaaaacatcccctcacaccctcccagcttttcgcacaatgcgccgcacaagagcattccatatatcgcaagtgcctttcttcacatttcactctcgagggtctcattatattcggccttccctgatccgcgataccacatctcaatcgtcctccaagcgcaatcgcgtacagccaatatcgggattttcaatggaccaggcaacggtgcatggtaagcttgcttttgtcaagtagtttatactggtaataatagaactacaggggttgaccctcactcatacacaagcggtcgatggcttcgggacgacaaacatcaacgccagctacgccggattgaccttaactttgacgagctctgtcgaaaggtagtgggcctgtaccatggcacaaaacacatcaagagctgtgagaagaaggaaggtggtttcaacagggtgttcattttcaccatggacgatagttcccgcgtcgtggcgcggctaccattcacctcagctggccccgcaaaatttgccacggcttctgaagtggcgacgatccaatactgtgcgtgaaacaatcatctgcgagggggcagcccttgcgctaattatttgtgccacgcagtacaaagaaacaccagtattccgatccctgaaattcttgactggagcgacaacgcggtgaatatcgtcggaagcgaatacataatcatggaacatgcggctggcattccgctacagcagaaatggccctacatgtcgggcgatcagaaagtcgcatgcatagacgccatttacaaaaagctcagagagatggttgatctcaacttttcggcctatggaagcatatacttttccaccacaccattgggctcttcctctagtctaccactagacggcgacttctgcctcgggccccactgtggaacaaggtattgggcttgtggcgaccccaggtactaccaacatacagctcccaatcaaggtccatgtgagttcgctttaaccttcattcctgaaattaaggactaagtcttggaaatacagggtcgacgataggtgcatattccgatggccttgtcgatgcaggtctttcaaggatcccaccgagggactctcagcgcctcaatcgaccaatctatcaaggctcggttcaggaacatttagctcttctgggaagtggtcgtgcggtgctaaatgcaatgtccgcggataatcgggttcgtggcgcagctgtgccggccttgtttcatcctgacctacacaaaaggaacatatttgtttcgcatgatgatccttcggtcataactggttttattgattggcaatcatccagcatagaaccggcgttctggtatgcagatgaggttccggacttcgcaacctgtgtagcttcctccacaggtgctgaaggggcagatgacagcgagctatgcacaaaaacctacgaagtctgtacccgctttctcactccaaagctcgcactccctaagtcgatggatgaacgcatatttcgaccctttcagtactgctacagaacgtggaaagatggcgccgttgcttttcggcatgagctcattgaaacctctcaggactgggaagcacttggatttcccggttcgtgtccatttgtcttaccgacacgagaagagatgactctgcaccgaaaacagtacaaatgttttgaggctgcccagaatctgaggcgtgatttgtcaagcttgcttgacactgcatctgatgggtgggttcccctagatgactgggaagcggcaaaagcaggaaacaaagcaatgttcaatggaatgttggaagccgtactgacaaataatgatccggatgaagatgagcctattagggatgaaaaagacctgcgagatatttggcccttcgatctgccggagtaattagtcgtttttcgtggatccaaatcttccattgtttgcaacttcgtgttagctagagtcaaccgaatcagacggcaaaacctatagcatagccactagctgcaaagtaaaacatatgttgccacgtataatgctaataggctttccactcatgctggaatattgactactatttattgtacccttaaatctacattggccacgaaacacaatgcctagtcggacaaaatgtagtatttcccaacgtggtgacggcgatactgccctgaggtcattgcgcagctaacctcacctcatccagaatggcgttcacaatggcgttcacaatgaaagcctggttctcctccggtacaacaaacggataagaaaaacctcgccttcaacacctcagcgtgcaccccaaaagtatcaggatgacatcctgatcaaagtcctccccgcctcgctgaaccgagcagactacattacttagcgcttccttatctccggctaacaccgaactactttaacattagtgttctcacgaatagattaatcgtcggatcatgtccatcgtaggaaaaaccacgagttttggacgttgacatctgcgccctttgagagaacgattgtaagtctattggagaaaatagtgatccgtcgtgggatgcgaagcatcggacagtttgagacaggccatccttgaagataagataaggccaggccatcttattaaccaaaagacaaggacaatttatgcaggcatgattggttcgctgttcctctgaaataaatattgctagtagacacagaggggtggcatggtgttaagagatgtacgaacatcaaatcaagtggagacaaataagccaataacatctaataaataccatccttcctttgctcagctggtgatcaattcaatagttgaatatacgtcctattcacttaatgtttaacgagttcatcgcgtgcaatggtcaacacacgttaaggatcaaccagtccccccgatttacacagtgacatttcctgcagggcatctgtttccttattctactatgacgagagctcaaacactgtcaggaatcgagcatatatagtagcttgggtgttggtcgctgaccaagcattgtgcctttttggccagatggcatagtgttaaagcccaagcatctacaaaccgtcacaaacacgttgagtcggcctcttaacgctatcgaaaatgagcggcctctcaattcttcaacgccgccgcacttagttatgtttgccggccttgttctggtctaaacccagccagctctttttctgattcccctactatatgctgagttagggagctgtattccatcattgctcctagggtcatgctcacggccgctgggagcatgattggtggacaggtaaaaccatcagcagaaacagcctctaaaacagtgatagattctcgattggtgacagatccattgaatagcttcttttttggctctcttgtgataataaattgagcccgtccgacgccaatttgaaagccagtttcgccaaaattgtagatgtcttgttggcatataccatgctgagtcaccacacgttgatagtcttgaaaccacctttccaccacagttttgtcaagtgcagaagctctctcgacgtcaagagctcgccggcgccgtatatagtactcaggatgccgtttcgtgaaacgctttagccactggttgccgatctgggggggggttttgtggccgaaccggtatggttatctttaagaattgaattgactgcaatagcaatttgacgacgatttatcgatgctcccacggggtcaaaagtaatcgatatattcacatagagccttctcctgtccggaacttagttttcgacctttaggttgacgctgaaaaagcgatttcccacctaaccaccggcgtcgtagtcgtccaattggaaccgcgaattcccgtgcagttttcgagatattaggtttaggttgctcagagagagagtcgatggctttaagaatcagatcttctatatctctattgtctttaggcatggtgggtggggtggttaacaattcaagagaaagtggtaggatttaaaaacattgttatttagatgatcctgttcatgttggtgaaggacgctcgctattaagggtcttaattaaataaaaaaataaaaaaagaggggccggttagtaggtttgagtaacttcaaccgccaaccgaagcgatgatctggctacgcaaggaacagcccatcgcatcgcgatgctcagttgagacaacaaattgtattttgagtgcttctcatcaaatgcttctacgcctggtaggcctgaccttgagtgtattgcctgttttagttgaaccgaaggaaatccggtgtttgcattcattcaccaggtcaatcaaattggaaactgtatgcgaacttcaccgagtgaccaccagggaacaagaaataacgcagaattgaaacagcaatgaaactgatatctctgtcacgtgggtgagatggcaagaaagagctcgcgcgaaggccgtgagacgttgaccactcaacttgaccgcccggccgtgcaccacatcaacaccctcgtcaacaattaatgttcatcaacgatcatcgacgttcatcaacgttaatcaatgctcatcaacacatccgcgacgcacccaaacactcaagtctctattcgctctgcgctctgatcgcagatggattttattgcggcggatgaactagcataccgcaaactatcaaggcaggagggtggggaatacggtgctcgatagcgaagaagattcagtcgtgaatttacgattctggtgattgataggcatctatttagcgctcactctatctctccaaagatgatacttcggaatacgaagaagatgaagatgttgtacaggtctttgcttcttcgaatgcccttgcgctactcgaatactagtccccagcaccacagagaggtgcctgcacatcgctggggagcgatgataagtccttggcgagccaagtgaccaagtcttcccatgactgagcacatttttacagtaacagggctcattggctgtgagggagcgcaagtcttacatcgctgggctcgtggcagcaacagccgtagtcacggaagctctcaagcccgtaggcacgagaggggcaacatgacacatcggagtgtgaggaccggagtcctgatttttttttttgggctggaaatccggctcattttatatatttttcggctacgtctctaccaaggaaccagttgcgcagatggtagcgagaatcactgtctcgttaataagcgttgaagcgatttgaacgacgttgaaggggtgtttggagactttgtggcctacagagtcaagcctcgacctggaataattcctctcaaaattgtgcgttgagtgtggtgaaccactttcattgactattgagaagaaagtaatgccgcgaaagtaagattggtacctgtcatcgaatttgcaattaaatcgctcaacgcgcttgcattctacatgtccccattttaaccacggttaccatttcttaatgggggttgaagtgcttcgacagatgccgaaataatgggctgcagactttgtggtcgacggaaacgctgtgctgtacctgcggttggccggaggaccttttggtctcactagaatcaatactgccatctctaggctcgcgccgctgaatgttattccattcctttctaattgcagctaacttgtgttgcctttactaaatttctactccctgggcgcgtaggccttggcatacttgcaatctcaggatggaaattgtctttctttggcatgatagccaaaaagggcccagacctttgaaaagctcagacaagaaactgggtctagtttccaggacaaccatgtgaactgatgcaaccaaggcccacgagctaggttctcgtgatcgccacccctcgcaagattgcaacgcaactattacactgatgagaccctggagacgaaaagcacccgaccggccaatcaaacacagcgtgaatttagacagacgcaggtagggttctgcgatgcagatctcagcggcgacccacgggacagtagatcagggaggttctatttgtggagagaaaatggaaacaattgcaaaggtccagacacgatctacaagcccaaagttggccgctgtcagggtccgatggaacgggggattgttgcctaggaggtactgctggggcaggtgagtatttggaataacacgcagactttggcgacacaatggtaggctacaacccgatccgtggttgtgttcttggtcgcagtcatgagaaggtaagttcccctgtcaagtggcaagctgaactttgcctatctggtctgtagaacgttctagaagctacgtatcttctgcaataagcctttctccgatgattattgctctctttagaccataacaacacttcctctccatctcttcaaatctaccgctatttcaataactctagcagacggcttgtaaagaactatgccaattatggacaaaccacatgagcttaaataaaatgctgttttactaaaaccgattggccccggacaatatttcgatgggggccggccctcctgcggccctaaaccttatttcaatcgatctgcacatcttgatcaagatgctgaatttaaagaaactttctaataaaatgttggccttaccgcagtaaatttatcctacataccgcccggcggagattgtagtgtttctgttctagttctcatttttgggctgcaaggtttagtcacgaacagaccagaaagtgggcagaaacccaggcttgaattcttcattaaaaccgcattctctcaccgagcgagcatttccatggttcatcacaacaaactctcgaaatgatttgcagtcccgctcgtggttccgcagtctgtgtcaaacttgatttccttgtgacttgcgcgtgggtcgaaagcagatcggacgcttcattccaaagatcactccgctcccgaccaccgatccaattaaatccaagcggacatgtttccttgggctaacaagaacccatatatttttagtcttgctaccccgtcctatctgcttatgggaaaactcatagtaccctgaatccttatacactgtccgcagtattttgcaggccacatgggccatgcccctggtttagaatgacaaggacgaaactgtgtagctgggcctgctcagaggctccacgatcatgctcgaatgttcagctttgactttggaactttctcactactgttgtaattccaaacaagggtgattgctccttcctatacgaaatccatggagtgatttatatctctcatgctgagtgttcattgtcgagtaagcacagcctttatggtaataacatacaccaggactatttcatcgaaatagttggccactgttccttcgacatagcaatgtagcgctccagtcgatgacatgctgctagcgtggacgttctgttcgccggtatctcagtttcctggcggcacagacacgatgtacatagtcccacatccaggacgacgatcgtgttctttgaggcgaatacggaagcggtgctggcgtcacgcagcctgtggcaaaaggtcagcctcttatataggaagaataaaagtatttcatacgtattttcgagcgtgatgtttgggctggtttatcgctgtcgccagaccggctagggtcggccgctagaattgtttgaaaccatttatcaatgttcctttgggcagagttattgtctggcaggggtgctcgtgaaccgctatcgaccagcgagcgccgcatgtcgcctgggcgcttttgttttccagaacgaccgggggctttggcgccagtgcgacgctgcttccgcagaatatggtactttttccctcgtaaagactcaacgcttcgatccacctgatattcttcataatatgcgtcggagagggctttccacgacaggacccgatgggaatctagccaagagagaaggtttttctcttcccattctggccagccgcatgcgctacgtggggacatggtgatgctcgcgtaagtcacaaaagtgggaagaacggttgaaaaaaacagcagaagtgaattcgaagaggaagggttgttgagtttaaaagatcatagtgttgcacataaatatggcgattgcgtttatgagccatggctcagcttggtgaactggtaccagactctcacgactcgctccagctaaagcttctgaaggccaaaagccttcaacttttgatgtactgtgtttcgttgagaatcaacaacgttgaacggccaccgtgcacctgttgacaatatgacgtgctttcactagttcgttgaaacatgtccgactcttagtgagccatgcagaaatagaatagatacctacgtgcagaatcagaatgcatgggtgaaaaatgcgtgcgcttgcaattcccgttatagtgagcaagcacaacacttaattctagtcccgcgatacaacttgctataaagccgaagtgctttcttctatcacactcaaccagaagtgggaaaactcgtcgcctcagcgtaactcagacgcagacatgggcggaattcgaaaagcctcgcgccctcttcgacgaccagactttcggagcagattgcaacgtgcattgtctttgtcgtccttagagtctgaggacaccggcagtgtgtccagcaccgctacaggggatacaacaagtgacgagtcaccttctcaggaggaatacgactctggcgaccaggaaaatagtgacgcagctgatgagagtgagcaagaagctacacgacagcagagaactgtgtttggacatgaaacggacttggaaatacgtgggcaaactcagctatccggagacagcaatacggttgctcttgaacgcctgacagagtaagtataatcccacacggacataattcagaattggcctgctaacaatatccagactagatatccgaatggggtgagctgctgtcgatactgagtgagaatgtaaagcactaaccgtctccgcaggtctattgagcgctcatcgcatgaccaagccacctggaatgaaaccattcgcaacgatctggtcgacatcttgggccgattggcaatcgtcgagactgaggtgcagaaggtgaatagacaaggtacaaacaaatctacagagggccagaagaccgggcgatccctgcgtcggcagcagtgatgcgacccaaactgtgtcttgatatccgaccatatttaccagagcaaggaaataattagtgttggtcttgagttgtggataagattgtttcaccgactgaaagtattactatggacactcccattatggacgctgagttggagggtcactggaaaaggtctgattgacccaatgccgagctggtgccagagcgagtcatgtatagttttgtcgtcgtactatggtcttcgaattttattaatgcttgcctaggttgtgcacaccaaagctacctcgcccgagccgaggggctagtcgcgacccactatatgtaaaagtgtaccttaagcctttcattagttccaccattgcagatgatttgtactgtctagtcccgtatgattgtgcacaatttgtacaactggagacatgccccaaaggctaaagccacagtagtacataagaattatacgccatgtaaagatgtttgcatattggttgcgactattaaggtgcgatccttcgtgattgatactagtagagtagttcaatgtgcctagtagttgagcgattgctatttgtgattgagttagatcaggacatactacggcaagctttggattgaggaacgagaagagataacaactgtagtgcgcaagaggagcgggggtttctccattagacccatagccacaaggcctagcattgtcctgatcggactatcaagatgcattccctttacatggactacaataaatcaactccacagaccagcgtgccaaggtctttcccatttttgaagcgtatctaagcggtgtgatactgaatccaccacgactgcgtctctacaagtatcagtcccacctactcattacatttcttaatgtataaaaaacaaccaagggctctggagttgatcggcctagagagtggtgaacccgccgttaacctgcgccgaacactgtatcgagacgcctgtgcttactcgtactggtggttcttggaccaaggcgcccagcgatattcttcggagcaagaaattggcaatacacataattcgtaatcactacccttagaatggtttggtgataatgttgcaggaagcctgttcatgagctatctgcgcgttgactccattaaaaaggcaattctatccacaggaaactaagacccagcaagtccaacgcagatattcgtttaaacgagagatccgaattggttggtcgcagacggctcctgctggctaggaagcgggacattcgattcagagaggctgaggagggcatcgtggccctgagtaaccgggccgctttgctcggcccagtccgcgtggatcactccggagcccggcaaataggatgccagtcgtctgttctggagggcatcgaccgtgttccaaaatcgagtggtcgtcgataccatgtccccgtgtgcctgatccagaaccagctgaatatcattccacggcacctgatcctgcagagcggcatttgtggactctagctgctgctgcaactcacagatctcgtgcctgacccgttgtctgccagctaacgctgcatctcttgctgcaatagccagctgcaatttcgaagtttcgtcggctttctcggcctcaagttgttccagcagctggcaatgcttgtctctctcctcttctctctcctcctgcgctttttggatctcttcctcaacgatgctcattacctggagacatttcctatgggtggctttatcatgttccggcctaggcttttgtttcttcatgatggaggatgcctagcgtagtcagttgggagtacatcaaggtatgtcatcagggcaatgttggccaaggcaaatccagaacatatggtggaaggtagaaattgggtaccgtatgcttgtgcaacccagtcgccggtttgagagggttccgatcatctttcgatctagaccgagtagaccgaaggggataacaggaaggcgcagcacgcagctgtacttcgctacagtggtctgcctgttcccggaaagccttgtgattctttgccatgctagatgtgttcgatcgtgagatgaacaatagtgcaacgagacgtggaaggttgaaattaatacaagaagtgagtttcgagaagctgaattatatagtacgaggagacccaagcgcatggcttgaacccgaatgaaaccgctcttgctcctgcccaggacgtatgccaaacaagggtcataatcctaagaaaactgagcactgggcattagtgcgaatgcacaaaacacctaccgctcgattatggagggtgcgagccacaggtccgcacaaatatgtagttgttgcatacaaccctgtctcatgatagaaaggaccaatcggttacatcccgtccaaagtgtagagctaagagtaaaatgtcatctttcaaatgttttgtgaagtttgccgactcccaggactatccattggtcagccctagaaaatagcggcgttgtctttccaaattaacagttctaagtttcctgtccccatacgtctggattccttaacaagccgttacttgagtcacggggaaaggcatttcttgcggtcaagaatcagtagtaagggtatcaatctagtgtccaccatagcatagacatgcttggggggataggaacctccagtgctacgaatcaagcggcagtcatagcaggtacatgagcatgttataattgtcagtttaagctacagcatgggtctcggccttcaccagttgagggttctgctattaagcacccagctcgagactcctacggctcacttcccctggtaggccacgatcacagtctatgtatactatacatcacgacaccggcgattatttgagtttagatgaatttggtaccgaattgtaaggcatattattggagggtaacattaacgctgtctttgacgcatgacaactagggtactcagtaggctgttagcgcatatgggatctctgccgcgtgctcccgtcaatccaagacctcgctcgctacctcatggatgccattggctgacgattggatatcgcaggtgccaagttcgatcccaattccctccgtttgcaatgagtttaatatccgccttgctccagcaattcccgctttcgcctctgttaactcatcatgcagtttcttattgtccgactgaagaatttgcatatcgtggcggagttcattggcctcagcccggaccgtgtgactttcgtcaagacagtcattcagtcgggcacgagtgcgttccaactcgatctttatgctgctattagcagccctaagcttggagatctctgccgtgaaagagccatccattccttcaccgataccctccgcctccaggctctgtcagcaatgttatatcaataaggatgcctagcatggctcacctccttcggaatacagttcgcatttgactgcgatatttgcaacgttcgtggggaaacagcttcgaatgaatggccgatctcattgcaaattgactggtaaagatgtatattgccgctactcaagcgagatttgagcaaaccagcatttgggcccgtgacggaccaagcgtatccatcttcaggtcgcggttggagacggactttttcaggagcgactacgatgcgaagtcggttatctaggagtattagctgagttattgtcagtagagggccacaaatacatatattggctgctagggcttctcgacattgctgattcagttttaagcgcttctcgttgctacgcttaggcatcgtagggtgccttcagcactcaaagaatatcaagggaatggggacgcgggtatttaaaatatgattcggaactgacccttccgccaaaacaccggctcaatgtaggatcgatgattcgttctttctcaagtcgaaagtggtattcgtgggtggggcccaccagtatccattcaaattgggtaaataaagtttcagctgaaaacttggattagttgagatttggttgaaagtcgggtataagttttattgagacctcatcaagtaaactgggctactaaagaaaacacaggaaaaagtaacctcaatttctgttcaaatacatcctcaatcattaactttcggtcggcaaacgctggaattaatttggttggggcgtcttcacgctgccaaagatttctgctttccaagttgccggcggaaccgatagtaacttaatggagggtggaaagctgatgcgactgagcagactatcgggttcgctaacaacattcccaaagacccagcaaatattggaatatatatattgagcaagattgggtcgactccatgtcttttgtgccatctatctgttaaaattgcaatgactccaacagctcgccggccctgccgccaaagactagccagcgcccacgatctgacgccattactgtgcgacccctcaaagcttctgccatcaaacatgatcactcgccatgccggtcgtaacattcgcactgactcatcgagcccaccttcgcagcgagccaagaaggtcgttgaaatgaggattcatcatcgatttcatggctcgcacgttacgttccgacaaccagaaagaccccaaagaaagggtgccaaagaacgccggcaccggaagcgagctgtttcagagcgagaggcaattcgactggactggatgcggcgacttcgtcccaagccccatagacgttgctagatcggacaaggatagggcagacatgaagcccagggggtggcatgttgcaatctctagtttcattcctatatcgttgaatagatgaaaataacttgcaagaaaatgagagtgagaatgcagtgcgtgatgagttagcccgtaaacatggactctatgtaggggattgctcagctaggcatcctatcgattggtatacgcaaaattgccagtatacaagaggatattctctacgcttttatgatgcctgttgtatacaattgcatatacaagtgcttactgtaattggaacgtatagaacgggccagaagaagtgtactgggatttaatgctgcttgcttgcatgataggtgtgccattatccgtgccattctcgaaattcgcaaaggtctctcaaaatacatattcttcaaagcctgtatcaccaagttgttctgagaagagatcatgctacatgctactctacatgcactgaagcaaggagaacgcagtttacggtgtagacagagtttatggggcgtcaagttttatttttatatacctaatttagacttgaaaacgatccgttgcgtgattcttgtgaacatttaatcatttagagacagcacgattaacaaactcctggtttcaatggccttgtctgagccacccgtccacataccacaagctagttggagataaccaaggacccacctatcacctatttggctcacgggattgactgcaaggacgacgcccagatggcgatgatgaccagttcgacctgttgagtgtcagcattattggtataacggtataacgtgggaatccgcgattacctctaatgcaatcatccacgatctctccaacgtaccaatgatggcaatcacaagcaaaagaagtgccattgcagagagatgacacgagatacaccgcagcttagctcgaccggcagttgactgttggaacaaccaccaataccatgcaactacacaaaggtaatccgctaagagaatatagaggctacccagatgagcagatttcaaaaggaaggttccaacgagggagactgctattttcgccaaagttgaagccacagagaaagaagggcatatgaaacgcagtaatcgaggtgtgagtgggttttcgcgctgctggaagattatgcgaatgtactgcagcattgttagctcagaacgaagacactgtatgtgacggagattggtgtgctgttaacttaccgcttatagtggtgggaatattggtgtaatccaaaagagtacttgactccatgctggaaacctgttgctccagaacaacccagtaaggatagcaaaggaactacaagacaaggcacacagcgctaaatcgactttataccaccgccagcgtggttggatgcaatacaaaagaaatagtcttccaaagttgagaagtagaagaatagtcaccaagacggatctgatgatgttttgtgaaaccacaaccatacttgactgccagttaatgttcttgtttgaacgaggccttgagatttatatactgtgacagagacatattggccaggtaatagtgataagttcccaggatgtcttcattcggctctaggattttcttatactgagtttcctgcctataaaaagcagctgccctcaatcttatgacactgaaagttaactgaggatccccagttgaggcttcggggcaacactcttgctcttttgctgcgcaggcccgagaatagaccacatttaaagcttgcagtatagtttctgatttaacttgcatcatgtaagaccacatttacaagggccaatcacagttgcagtatcctgctttcacatagacatcgaggatatgcagaggtggtgcatacaattataaatgcctaactcaatttctggagagcactgccattctctcaggactcagtcttcggacccgtagaaaaagtaaagtgtgtgctcgctacaatatgccttgaagtcacacaatgttttgataaaacagcattcacctttaaaatggctggaattagccatagagtacacggtgtcttgaatgagtgcatcccaggggcagttttcatgcaccgcggattctccgtgtcagtttcagcagcccatggttgtctgccctggacggactcattagcttatagtgattactccttcggccgaaaccgtaactcgaacctttcctcaaggctcataatttgatgatgttttatcatcgggaaatcaatacgtgtctcctttccaaagggtgctgggatcagaaaatgcggagaccggggttacaatatccgttcaccgtcatgatagtatcttgctattcgtcggcacactatggaacggagcaaaatggatagctacatcactaaaacataaaagaaagtgagatatgctctattcatgggttttaatcgcttataattttcactggcgatctgaagtgcctatatattgtgttggccgatgagtagttgtttcaacagcgtgaagttaccaaattggcaatgatatatagattgtgtttgccttttctcactcgtgtcagaaggttcaagacaacaggttatacaggatatcgttaattggttcctgtaatctacagcatgcgatgtgcaaataaacgtcgatagacgtgacagaaatgccttctgctatttcaggtaaagtcaatccgctcagaatgtgggacttctcaaatcggtcacgtttctccttactcctcgaaaaaatacacgcagactttcccaactaagaatcaaaagttaatgacataaataagagataataatgaaatcgaaaacagcatctggatcaccgcgacgcagacatttcatatggtgaagtgacgcacttgaatgctaacggctcatctagacagtacaccgggatgaaccaaatgatggacaacaggacatcacgtttcatgcgtgcgaacatttgtggtccactacggcccatatttccacaaacatctcgatatcacgacatgtaaggaattgccacctgcaacaccgctttggaatactccacgaggccgtatgtcaagaccaagtacataccatggagactgggctgccagacctggaccattccaattctctcaagagggcgcaaagcgtacagagcacaaccgcagaggttgagaagcactagtctgccgaatgcagtggccagtggagagggagtgtggagcggctcggcgaatgcgtgaatggacggtaccaaggccaacaggaccactgtggcaaattgaagagacaatcgggccgaaaatgcccccgtatccacgtctttgagatagccgtccgagaggcttccggccgcgatcatggtgaaagccgatgcgtacccaagttgtagcaatggttgggcgggaaagagaaaagcgatcgtgggaagagctgtggtccagaccaggaataaaccaacaaaccacggggaatcttgctctttcgtcattttctccttctggaatgcatcaacgccattctgaaagataacatacagataccatgtggcacttcctccaccaaacgccatcactgctagagcgtatgggattgactgttgagatgaggggaaatggaagatcaagaacataagtagataaatgacaaagtaggagaatccaagcgtgcctatgatggcaccgatggcgcagctgcgcaggttttggtaatcgagagtgtccattgtgtaaagttggagtaagcaccggccctcttgaggcagcatccctcgggcgagcatttggctttatagacaagagtggaactcagatttactcattgaccgtgggtgaggtattgcagaaacatacagtaagtgttggaatactgatgggtgcggtgttgatcacaagaacggtgaggaaccatcatatctgtggtgaccacccacctcaacggccggcgcctcagaagtgaccacgtttaagttgagttgccagaaactcattttttgcctcatcgatattcaatctgaccaaccgaccgacggaccttcctgactatgtaattggtctctctcattatgcaaatgcaggacctgagagtcgattgtgattctacctctcttccatgatagcaccatggaagatattgtacagattgtacgccagatcggtcaacaacaagcacataatgcatattatcgcgattgttattccctcttcaagctactccaagagctcacagaacatacgttcaccgaactacaaagactttacaaatccggcaccgagcgctcgaccaattctgtccatcaacttctccgaaattttcagaacacaatctgtaatctggttgaaagagcatgcgaagcccaagcggaatgcgaggagttctgctcagtgaatgaatcacactcagcgcgcgttgtcttcgagcccatcaggagaatgtacaccaacccacaagcctcagcctcattgcagggtacaagatgatggtggaactactagcctggcattgtagcctgggaagatggacgagcacgactggtcactctactatggtgatattttcaaaggcggaatttctgtaattctatatagccgcgaaaatcataatgtactttgtgtaccacagtatttctctccaaaagctcatacaccatgtaggagcccaccaacacaaagctctcatgaatcagacgcagctatcaagaagttccgattaccacagaatgtgcaccataaaggcgagcaatgtttagcccaccatctgccaccgtccctatatatcatttcccacactcccagccgaatgaccatctacgggcttggcaattagatgcaacagcagaaaagatggaccaaccatatggttgaaccaccaatagaaaagaacactgccaaccatgctgtggtaaacatcttagctccaagggtaacttcaacgccgtaaggctgcagggtgtctttgaccttggatgcaaaaaccccatacatcaccgtgaccacaattgtggcagtcgtaatcagcatcgaggaaagcttaatttatcagcatgtctcttcgatatttgtccaagtatcacataccgtgcaaaatatggcaaggggtctgctgccttttgaaaagaaaactttgcgacaagccaaaactccggataatgtggttaccacaaacccagcaatatacaaacagatcacactctgggaaaaccgtcggtagccggaaaccaagcttaggtcaatatctggaagtatgttgctgagatttatgtcaagcacggcggatagatcaaaagtaaaagagctgctggggtcggagcaaaccatctccgagccatccttggctttacagtagctccagaggccaaccaaatagtattgaggcagatgtgacttgaattcgtgtacctgggcttcaaccatgctgcttgcagccgacgttgcctcatgggttgcttcgtttgcgctggcatggatgctagatgccacgccttcgacggcatttcttcccccgctctcgatacgcgcagtatcaacattgaatgagccccgaatttgcaaatcacgcagctttggaaattctttcaggtctacctgccgattgcttagcattgattagcatggaagtttttcgggcgtatcttacttttagaaaatgtagacccttcggcgaggaagacgacgaacatccgacaaagacaagagatagacagactagaacggcgacggtaaatgacaatgctgtggttgaaactagcgaatccaatctgctcttggtggaaagcttcatggcttcagaagggagaagataaaggattgtatcttgaccgaataatagactttgagatcgagagaacaattgagaactatgctgtatcgcaattcagggaagcatatatataaactttccagatatggtcaacttaacccgtgtgggcagtgttctgcaaatttaactgaggccggcgcaattttccgcctcattctatgggcagtagtagataaatgtgtcaggtaaactaccagtgaatggggatccataatacataggtgttgtgagggcaggcagataattgacagcattaaccgccggaatatgagggcatgcaattacaagtgatcaggctggcgagttagatcttcggcccacaattattctcagatagattcaataattaaggtggtataaatactactgcacggagtgaccctcgacatctaagttgtctttctcgttattccatacacctcctcacctgtaaatcacaggtgacttgtactagaccccgtcatgtcattttctaggcagtcagaagttgaacattgggagcggaaattatatgactatcgagaaagncatttcgagctatctgccagagtgcacatctctcacctcgtcttcgagagtgggttcagaagacggatggacggccggcagaatatccgtcgattgacacaaatgatgaagatgcaaggctgtcaacgcttgatgagggacaaccacgtgccggtgatagtccccagggctcattggcaagatcgcgtgcggccccgatctggcggtggaatcattcctagcttggatatggagctggactataggttgtgcgcatacgaccacgagaacctnataacagctgcaaggaatttccttgaccacgacaatcagtggtggatcgtagatgtctatctaacagataatgaggaaggtgcgtttgctcagtttcagctctcagagatcgtcgttgataagtttatagtgtcgccagacgaccanagaaatgaagcggagtctattcgtcacaaattcatccaatcgctgaaggagcggtatccaaacgacaatcgcccacctgatggactgatctacgagcggattaaccggtacgaaggctaccttgatacgcccagggatccgctcgctgcgaataactggtgggctgtactggaggccctcgcgggaagcaagaaaggaaagtatttgaagcaatttttcaaacacgagaccttacaccaaaagctaaattctttgctcattattccgggtctctggggagggatgcggattgggctacttcataaactgacagccatgcattgcgacgaggtaaatttactctgaaccacaaagccagttccatctcagctaacttgattgcaaatctagccagtagcatgctactgggaattgatcttctncactttttcgagactggttggaggaagggaagagcttttattgctgattgacggagttacggtcgagctgcttcaatctcgcgtccctaaaatctcccgtaaagatttgcaatccttgtaggtcgagttggaggagggccggcttttcccgaacttctcggaagaggctcggcaggacatatgggcgcgtttgaaagagatcgattatccaattccaaccttgaaaacatttttcaaagatcggctctatcttgaggtggctcaaagtgtcatgaagagactgttcgtccagccgcgaggggataagattaccattgacctgggtgtgtatgggaagtatgacactccggttcccgtctcgatggcgctgagacaggaatggttaggatccgacctgctcgaattttggcgcttcagcttccagtatggatttgaaatgaccgatcaccaacgccttaaatggccgacagacgctgatcccgaggatatgcttgatcggcgaagctccggatcgtcctttcttcccaagcaggaaatatggggccatttctttacactggtgagagcgagaggtttccaagcacccgtcacagacgacacgtcatttgcaacaggggagctaccttcccctagagtgtgcgaatttccagaagacttagccgaagaaatagaagttgccaaaagatgtgggaagccgtactcgaacactgtcgaggcagatcgattcgctttgtccgcagagacgctgcggcaaagtcaagcctcggttcgagtgacggcggggtttctccgacagtctgtttttaaggcgttctttggctatctgtggaatagcaatagtcaaatggccggtggtgatcctcctgacgacaacattgaagttcaccatcgcggcgaaaggccgactaccgcaaatgttggtcgggccatgatggccacagacggcatggacgtggatcctgggagcctcaggccaaaccctctcgtcacctcagcagcgcggacgcataatgccgcggctactgcttcaccagctgacatactgccgccgttcggtgtcatgaccatcacggttggacgaactacacgaatattagacctaccaatccacgactcatttatgaaagacttttcgactggtctattcaacaacaactttaacgtccagaccgatgagagggaaaagcgatccatttccccatatacgtgctactctcattatctgcacaatccgtcgtcggtgctacacgccgaattcagacaaaatgagcatactacctacgctattgcaccctcgcaaatcggcgctgggagcaagagaaggatgcttgatgaagacgagcagatggctagagcggaaatatggttacaggagcaaattgcgttgctttcggatcggcgtaacggcgacgaagacctttgacgggaaaggaggtatcaaattcgggtttcaccaaggccttgaagaggctcacggtatagaggaggcctggtatggtagagatggtatgagtgagacatgtaaaaattcatatgttatgatctatcatatctcagagcatgttcctgtaaacggcaacgttttagcttgaagcgagcaagcctatggtatctatcttatatagtgcgaaggaatagatgataatgtacttcttgatttattgggatgcatcgtggttcgatcaattatatttattagacatgcgcttggtgtccggcactgatcgttatttatattttacagctgacaattagatgtaagttccatagcccgaggaatctcaatggcttcaactattctctgatttatatactcttcttccattcaacatatagcatcatacttgtagttcactctctggccaccatcaagggttctacaccacatggcgtcgcttcaagtttaacaagtgaggtgctgcctcttttatctcaatggactatggtacactccgccgactcaaatacctttgctgacccagaggcgcaatgacaangaccaccctcacgatggtccgcctccctaaatatataattagacaacacaacttgaattccatatcaaagagtggcttacttgatgaggcaggtattcaggtcgagttccccagaacccttcggcgagggtattgtggtngggccatgtgtctcgctaggtgcgcttggggatgccgagatgctcgcaaagcttgatgtattcgggagctcgcagctagagctcgcagtatgggtagcagacccggtactctcggtactggtgcttgtctgttgttgagtgctttcgcgtcttgtagtctctttattcagtggtggcgattggcatgaacaattgccctgctgttgcgagggaacctcatcaccagctgncctttctgcatgttgcctcaccgaagccatcaggggaagttgancgtccagggagactgcaataccacgacaatcgatggaaggaccatcaacacctgtaaaggttagcagtcaggtataatgcgagggtagtatgatacctacatcnactgagtgcgctttccatctcagcctcgcagtcaggcgacaaggaaactgattgcgtgtgtccagaagttgaaagcgtggcattcaagcttcctcccatagcttggtgccatgtgctgactgtattacatgtgaattgaatgaggggcctaagatcaagggcttgaacctgaccgaggatagcgatgactgtaagcagagacctgaacatgatcaaacaactttggtatcaaagacccggctttggcgggtggtgctgcgaagcgcttttatatcatcaaggctcgatgagcatatttctgaggcaccaatttacctaggaggcgtggcaatcctatgaaagtaaaagaaatagagaagaacgacgggtggtgcatcattatgttggcatcactggcatcaaagaaatgccgatgacattgaaaattgatgccagcgggagaatcaactcttaattttgggacagcacatttgtgcccgtatggctcaatttaagattccctgcgtgtgaagctataactttagaaatataccatttccaagacccaagagatatatattaccctcgatctccccctctttaacggactttgtctatttccaattaacgtgatgagggccggtatagattctgctagcattttgttgctgcttctcgccgttttagtcgtgagtggctgcacattcgctctgcattatgcgagtttcatatactgactttcgataggtcgcaaggccccatgatgacccgatccacacagcaacatccacccatccagtgcgatccccagaaagcgcatccgcgaccgtgacccgctgacgtattttctagtatcattcttcgccaacattcccactgccgaaactaccgtacgaaatgatcatagaggtcggtccctatcattgattgtttgcaagtatctaatgatcgcaacagcaaactccggcttgtgtatattcgcacggaattgcttacatggacgctacgacggagaacattgaccacttgagcaaagtcagcgaaacctcgtgcaacgttgatgctggaaattgtcatcgtctgtcatatgccaacctatctggtatattcctttgcaactatgtaagtgctccaaacttcaaggcaaatagggctccgtgctgacggcactaagagccacgagcgcatctcaacaaactgtggaagccttgtgccactggcgacaaaggttcaagaaacatgtcaggtcgacaacttttatacgtttggaataatcggtggctcttctcaaaacgcgagtgactcgattgactttcacttggtagttgcgggcgaatccatggggtaacctatagagtagttcagacctctcggccttgccactgagtcggattggtattcgaggtggaccaattaaggtgctgccggagcgtagcacggatgtgattcacatttccgtatgtatattcttttagaactctcaaattagggagctgtttttcctatgcacgcgctcgaaatgagtttcaccaatttgttctctnnnnnnnnnnnnnnnnnnnnnnnnnnnnnnnnnnnnnnnnnnnnnnnnnnnnnnnnnnnnnnnnnnnnnnnnnnnnnnnnnnnnnnnnnnnnnnnnnnnntattttctagtatctattcttcgccaacattcccactgccgaaactaccgtacgaaatgatcatagaggtcggtccctatcattgattgtttgcaagtatctaatgatcgcaacagcaaactccggcttgtgtatattcgcacggaattgcttacatggacgctacgacggagaacattgaccacttgagcaaagtcagcgaaacctcgtgcaacgttgatgctggaaattgtcatcgtctgtcatatgccaacctatctggtatattcctttgcaactatgtaagtactccaaacttcaaggcaaatagggctccgtgctgacggcactaagagccacgagcgcatctcaacaaactgtggaagccttgtgccactggcgacaaaggttcaagaaacatgtcaggtcgacaacttttatacgtttggaataatcggtggctcttctcaaaacgcgagtgactcgattgactttcacttggtagttgcggtcgaatccatggggtaacctatagagtagtccagacctctcggccttgccactgagtcggattggtattcgaggtggaccaattaaggtgctgccggagcgtagcacggatgtgattcacatttccgtatgtagattcttttagaactctcaaattagggagctgtttttcctatgcacgcgctcgaaatgagtttcaccaatttgttctctttgattgcttctccacctctatttttattgacgctaggcctaatatagctagtgaatatttattgcccttttcctattcgatagtaattgatgggctaggccagatgtaggccgaggtggtctggccaagtcttaggaaagaaccaaagagaataaaatatggtgaaaggaatttcgagcggacctgtaaagctcgtgcgttggtaatgcccttccttcaaaatatcgaaggctatcgcttcccaagaagcttcttagaatgcttggaataccattcgccgtgttgcattgtaaaatcgttgaaaaccagtaccagccttaactcaatcattgtgctcatgcttactgcatgaccgatgagataatacttcgacagtacttccgcccaaaatagccaaaaagcacaaaacaaataatgtcacgcgcgtagggaaggaaatcggtcaattaccagagcggtcaaccccggaatattcaccctatttccatcaactggcccctcactgcatttctcgagataatgctgaaccaacaaagatccaatcaaacatatccgcctcggggatagctcatttttagtcatctcctgcttgcacacaactgcctttgatgaaccgtttcgagatgtcagttcttcgagctctgcttgtaagaatgacaagtgcgcacgaagacgcgaaatccgttttgaatttcgataaacagcccgactcagtcgtttcaatttgggccagcctcgtctcttcagagtttcaattttggtcaggatttgacctgtacctaatagatttactaatggtacccgagattgcttggcagggaacataatcttataatcatccctctttcgctgaagcgcctgtttagactgcaattgagccaacagatgcgataacatggtcgtaggatccaggctgggacggtgaatatttggtattgttgccatcaatgttcccaccggccgctccacttcattctcgacggcagtgatacgatgagttggggaggtgcccgaaaagagtaaaaccaacaggatcatgcaactgatacagcattcatcggagatttggtctcgcctatctggcgacacttttgtttctaaaggtttgccgggattttggctaatcaattgatgcccagaagtcatgacctggccggtacggatgctgtacgcacccccttgcgccgtgggtgtgttggagctaaagtccaacatgacgtacggtagctgtcctggacttactgcgcgggactagcaatattaaatagagatcaagtattctataataactggaacggcgctacgagtttgccagtacaccataatgcgaccgcggtcaccgttgtcgatctttgaggctaggccatttgtatcgctgtcggcatcaacgggataaggattatgctggcaggaagcagaattggaggctggagacggtgaagcctcattatgagaatggccatgtccgtaccaggtcgactccgaattagaaggcgtagcgtacatgttcaaagcacgactgtgctgatgttgatttcaccgtgatcatttttaccaccttaccaccttaccaccataccaccttcaccaccttcaccaccttcaccaccttcaccaccttcactgtcgctgagtcttgaatgggaaccactcttaggcttagattgacttccatcccatatacactgaacctagaatttcaacattaaaatgtgtcccagagtgtagttggagaaataggtggtcttgaaatggagcatcggcttgatctatcaagattaatcccagataaattttgcgaggtattttattaatgaggtgccaactcaagtatcatttgaaaaatgcgagaattcagctgtcctaggtatgactttcgctcttttttccggggaatctaccactcgttgcgaccgaaggagagaggtcgaacccacggcatgcctcttgagataacggaggataaagcagtgtataataaagaccccgatcaaagcaacactgcctccaaaaacgctgctgagtataagtaatgtgccctgctttgaaagccttgccgatagattactaccatagattgctgtatcgtgcctttcatgatctgaggtttttgtggctgatattggtccataaatcgaggaattagtttgagagctagccagcgtgcctgtcaacgtcctcgacaaggtttggcttttatcgctatgggccagagataagtgatgcctagccgtcccagtgatacgaccagcagtgccagaccattcggtgccagaagctccgtcgctttggaaaaccctgctctgtccggtttctctgatctcggaagcttcggtatgtatttggctagtcgaatgatacagggactccacgaaaggtcccgacgagtcctcagagtgcggtgtttccaaactagcccatacttgagatgtacgattgaatgcagacggcaaaaaggtggctcttgtggtcacgttctgaagcaagtcggtagtgttattctttgaattctcaatcggaaagagactatggtcatcagaaccggtgctggtatatgatcctcttatggcaccggttatggaatctttttcggtaattgctccattgtgcttgggttccgtcgtaggctcatcaccaggggcgctgactggagaactggagtgtaatagcaaatcacagtatgatggacgattcaaggccgacaaagggaattgcttcgagactggtgtgacgtgaagccttgatccctcctcatgtagtgcctggcttgtccgagaaccaatagcttgagtgtacgtagggttctgtgaggtcaacgtcggctgtaagtcaataattgtcagcgatgatgttcaaaggcaatatatcgtctctgaaggctgggaaagtatgagaaaaatctggaaagaggtatgtatgatacatacgactgctgagcgatagctatgactttccatggcaagcttctttacagactgaatatgcatcgatcaagcacggaaagaccagagcgtgtcaataagataaggtggactgttcaatatattgggtctctgggaatcgccgatataattccaagttcccagggctaggattgtggcgatataaaaggcacatagactattataacagttagttatgtctggtgctggccttggaaaatgtcaattctgcacgtcaatacccagccgcatatttttattcgctagaccgcaatataagtcgtagcagtaaacatcgttcaaagttcctgcgaatggtgaccatcgttgaagtaatagattggacgattaggccatcgcagatgtccgacataaataagtgcatccaccggctaaggcaaactactagttccattgcagcaaattagtggacaatagcgcctcccttaagccgtgtcaagcgggagcaactccgtaagcgtcgcaacaatctactacgacgccacaatgaattttggcttctgtatgggatgaaaagctggcttatcatggaactgcctgatggtcagatctttatataccactcctatctagatacccctccgcccttaagggaagatatggtaagacaaaattaatatgagtattcgatgatttgccgctgattggcgaaagaaaacacggcctaagcccactattgttcgaacgcctcgcgactatatttctgcgacctctgctcagtcagttggcagagatatcccggtcttctgcgccccagttcgtcaggaccaaaaatgggaagctctggcgaatcatttgaacaataatcgctgcatggtctcgtagtaatacaaaccgtttcgtgcttagttagttcacttcggtgcacagtgggatccgtggcgcacgtcaagaaataccgatctcaatacggtggttaaagcaatggaacctgttcaacatagaagccgggtatgacatcagggagaatcgaaaccaatgtcaccattttatttctttgattgtttctcaaactctaaatctagtcacgccaggcctaatgtagttagtcgacgatgtactgctcatcgccctttcctattcgacggcccgaattggtctaggccagaagtagattggaggcgacgacccaaagaggacagtaggaaggctagttaggagcggacaagtaaatttcagttggttgtaatacttgtcttgtttcctacggccatattgagagcatatcataattctagtaaacttgagaagtttcggtattgagaggctctattcggtatatgcaaaggcctaacctatctatgggctgtgatcagctggtgatggccaccgattgatattggtctcaacttgcttcttattgagcctgccaaccaggggatcgagcgagggataatggcttatcttctacgacacattgcaaccgtcaccctgtgtccagttccccgatgctacctccgcctaacgtgcatccggcgatgtcggtggaatcgaccgtgtttcgcgcttggatcaagagaaactgtaacatgacataagtactgtaaacggaacgcttcaaaagggagtataatacttactgattgggtcactagaaaggcgatggcttcgcctcacgctgtgagtgggtagcgagccaggtgtctgtgttgcagagaattgtcagcgcaagtcttcgtgatatcataatatatgggcagtgtgtactaccggctctggtgggaacatgattgcctttaatggcctggaagcctggtggattattagcatatctcggactcggacggcgaaagaaagagccataccactggaatggtaaccagtaggacgcccagaatgaagaaccccagtgcgatcatctgtattatttttttagaaacgctatatgcatcgtgaaggggaatgagggaaagagttcgatgttatatacctgacttttgtaggcagtcttgcaatacaaattgtggttttggggatatatataacatgagggagagagctaccgacccctgttgaagtcacaatctaaactctttggcccgcagcaatttgatgctatcgcctactcagaaacatgaggaatttttgaattcatcctacccacttaaacggtaccccaacctcagccaaccaggttctcacatttagcaatgatatatatttaggggaattcagcagctcacaggctacgtatcgcttcattagtttagatcattatttataaaacccccaaagggctaaaattcacaacttaatcacctctatggtcccgaaagatttgctacatgagggtatgtttgtcaccgaatttgacaaccggcgtgcttactaattagctaaccacttcggacaggggtgatggaaagcataatctcgctacccggattttcggctcgttactttccattttgcgctcaacaccagattctgcagttcatacagcgacaactcgaaacccatgccttctgcttccttcagcgttggcttccatcggagtctctcgcagccggatggacttgcccagaggccttagagttgcacaaattctttcgtctcttggaagtccatcaaggaaaagtcaagggcgaatgttttcagttgacctggagcacgttgacaggatggcgtcgcgtgattagtagcattcgccacgcagctgtgcaccgcattccacacgatcggaaaccattccttaagatggttcgcgccgccatcaaattttcgaaatgcatcgctggcttcgaaagctccaaaagactttgtcgcattcaaaagttcgtgaagacatcggtttcagagttcgaccagctgagagcccagctaaaaaacaatgcccgcttacaaatttctttgggtgaagcccaccccgatcatttagcccggcggttagttttgcttccggaagctgtcaagagagtgcttcagagcgttgaagacgacttcgtctctaaagtgaaacagtttttacatgcggagttcaaaagtacttaggggtcgtccgcgtatcctacctacaacgccaagcgcatggcgaactgcaccgtctcgtaaaaagagtaggaatataaagaataaattctgaaattgctcctatactttcaagttccgtgaaaatgctcaagccacagatctaattctgtctaggtgtcaggtcactcggtccactttcattccgaacccacctcatccacttgtcctcagtcatctgtcttgaaaggagtcaaagcaacacaaagctctggaagtgtcaaagccatcgaagcgaagactgcctaacaggagagacgttccactgctgcttccactcctgttctgcactggtttcctcggcccgcgatttgtcaagagccactcttaatgaaacgatagctcgaatcaagcgaggatccccagaagggctgtttgcccggttgaaatgatactgcaaagccaggctttgagttgcgtccattgtggtgctgacaagttggtggaagctctcaaaacacttgcaataaaagtcgttctcaagtccctgttgacggtgctgctgtatcctttcggtcttcaattcggacattgacatttcggtcagtgttttggattttctcagtcgtggccgggttgtttccaaggccatggtagatccgctcgccatagagatttggtggtccagtgaatttatctcaggaagagatggcttgatttgtagggtagttggtatggtagtaatagggatagtatctttggctgtgtctgtggatcgactgtagatgcttgaagtgttgtcgcgagagtaaccgggagttcgatgttggaaagggttcatatcggtcatggactgtccacgtctcggctctctgaaaccgacgtacatagggaacgggagttactagcgttttaagaacggaaagtccatttcatgggcgaaacagtcaatttgtgctctaaggtagtttctgaacggcttccctcacattctcaccacgttgacgaaccgcgcactcttagccgtagaccagcatcggcatagtaccaagttagtctgttgagaacttcagcaatgttcctagacgccaagtatattgccatactaaggggtggtattatagagacaacgcatggttctttgacagcgagcgaacttttgtcttcgccccgccacctactcgcgctttcagatttcaactaacgagggcgaccataacacgagtccacgggttacaaggtatagacagatcatatcccgcagttcgaattcagactcctatctatgataatcatatgattctaattgttgttaatattgccagagtaaacctagtctccgtgcgtctcgcatttcatggggtaacccgtcgagacctaactagattttgtattctacttactaactgacttaaacgccaaactgaaacttcacccaactcattaccgccgccttttctgccccagagcaggttctaggaagtgaactactcgctttgacccacgatagcagtaacaagatctctgcggcggccattcttgattctgatgatctgtgcgaccaaactgggcgtatgccttttgctcatcgaggaattcctgcgccgatttggggaaaccaccaatcctttcgcgaaaggtatcattggcaatttcaattgtgaccatttcgtcaaggctggtgacccgaaaatcaacgcgcttcctgaagtatccacaaaaccggcaaatgtcgactagatctatgcttcctaaatcaagatcctgaccagacttaaatctggcgccggggaactcgacaagcacccgctgcaagatctcggcaggatttggtcttgaacaaagaacagatccccgacaatgaaatgaagccttaccctggatgggggtttcatccaactcaaagaaaaacattgccgacgcgagaatggtcctcacaagctcagctggaactgcaaaatccatattcgacatcgcttccagcgagcacacatcgtctaaatcagggagcgtcccatcgattgcctggtctagtcggaaaatatcaggcgtcgacagatggggtaggtaattcagagcttccaaaaacccttgctttccatccatagatggagaggatatcatggcccggaacagtcggggaagaggcccctcccagattcgacccagtatgcccgttggacgactggggggagatgtggagaagcctgttccgatagagaggagaaggtcgtgtcgtttcgccatgggccagatgatgctcgactctcgcaaagcaatggcgagtgggttgttcgcacggaccccaccgtcttgcagacaaaggcctggcaactcttttggttggaagtagctagaaaatgtcagcgtgttgaaatgtctcatggagcttggactcacatgggtgctgcaccactgcatatcgacctgtcaaaagctaacnnnnnnnnnnnnnnnnnnnnnnnnnnnnnnnnnnnnnnnnnnnnnnnnnnnnnnnnnnnnnnnnnnnnnnnnnnnnnnnnnnnnnnnnnnnnnnnnnnnnattgattgagaaaaacgtcaattgccgtcaatgcgcctagaggaagtttcttagtatatcaaccacaataaaacactcggccactcggcgtacgtacctacactggttccaatgcacaggtccggcaaagatgcgatcggaatgccaatgcgactttctaaaacccgtagaaggcccagttggatcagaccgcgcactccaccaccatctaaactgagaatcaccgggggcttcgtcggaggcagttggcgaacagtgacgtcggacctctcctcgcagatgggacattgagaaatctcgaaatggtactccccaagacgacttggctttccgaagattacgacacaagtgtcacatattgcatgcttgcacgggagcatatgctccgggggtcgactcagacagaccaaacaagtagtggtggagcgaagaccaccccactggcgatacaagcgacataacgtctcttttcgaatggctgccgatgtctttactgcgctcaattgcgcaaagtggtgcacgaagcgggatgaaacgccagcaatatggtatttgaactcattgtcccagatgcttagacatcgcttctcataagtgcggcgaacaccacggtaggcgagaatcctgggcaaattagcttcttaattgagttgagagtatgagtcaagaaggatggtcgtaccatgcatttgagggggataggcgtccatcaagaaggccgaggctataaggtcatcaaagtcctcctttgggtagccaatgcatgtttgcataacctctcgaaggcaatcgtccatcgttttgttcctcacatagtcccttcgggctctttccaaaagatcaaatggtggtgcatgcaggagccattcgtgggtttgtacccccgtgctccagaaagcgctcagatgagacgccgagaagcgtcgacaattggaaatttgctcggcctggactatattgagctgcttaacgatcaatgtttgcagtggctggaaaacgacgctatctgaaagcccgtgacgtggacgcaggtccagaatcgtgactgtcccagtatccagcttttggagctgagcgcattcctgtgcgaaggcttctgttacatgttgactgttggtcaagacgatgactacctgcaggggagcgggaacaacctcatcgctaattgtaagctgtcgacgtggtctctgtaataagtctgttgcggcttggatgttagggacggagtcgaggaataaacacaggatctgggtccatggtaaaacgagttgcctcttgacctcttgctgtagccttgcaggggttaacgtcccgtctgcaccccctagtgagaaggtttgatgctttgtcgttggattctttagccacttggaatcccccaagctttgttcgaggcatagaccgctttcagcaaacaatataggattctgtgtatgggcggtcttggtgctgagatggagacggatcaagcctgcggggcctttccgtgtgatgttgttgtaggggaacagagtccgtaaggctttcttgcggtttgaatttccgtaaaagtagagcaggcatggatattgatgctttggtttgggtaattcctgcactagttgttctaggcggttggtatcaactaaatcccaagcttcattctccttgacgaggtcaagccagagtgccattatagagatcgagagattgagagattagcaaaaaaatgggcctactggggactttatatacggactctcatttgaaagtgactggcagtgacttacaggtggccgacgctcaggttgaagttggcataaccttgtctcgcctcaaaatcccctctgaaccaaaaatatgtcaagcaccagattccttccgccagtgcattcgcagatgacgctcgcttaaaccaattatgcagcaacttttgcgtttcgttagaagtcattcgttttggcttcggaaaccggaccgcgtaagtctcacagcaaggcaaaaatgcatctccccctatactaggacccctagacctagttggagcacgtatcatagtggcctttcatatggactatttaaagggctggcacggttctttgttgatttgcctccttacggtaaccttaaaatcttttggtcatggccttcggtgtggacgatcatacaagtacgccagcgaaaacgggatcagaaaagactccacttcgcgaaattgaccctgtgcttgttctgtcttgctcagctgcggatgtggccccggcgctgtgtagagtcaaccagatgcaccacgccgatgaaacttcctatgtcagaatgcttagagaagaggcagaaatggatatgcgtttcagtatcacagttggcgcggctaactgggcactgctggccggctatctagtcattcccggcacattcacttcgctgcagacctcaaaccaggttgaaaagacgttgcaagccaacgaggccggtcgtacagttctacatatgatccagaaccccccgttactcgccattgcgtgcttgctttttgttagtggaattgcggctctcatgcggctgatgcatttcccgaatctcaggggaaactacccctggctaatcaacaaagtatttgtgtaagtgagcaaatcccaactgaaagaggtatgaaaagccagatccaactctaatcctggactagacccctatgcctgcatgctgctgctgggctgctgaccactgtcatcaatgtttgtacatctcaaggtggggattggtcggtgatggctatcataacaactgctgttactggagcaactcttctgagctgttcagcacttcttgcgctttacaagttctacaagctggagcggatcagaaaagaagatgaggatattcggcgttctcgagcatccaccactcttgatacgtgatatcagagttttcagaccgaagagcctggtcggaagtattaccgttgcatcgaggctggtattttccatcttttctgtttttgattctacccctgattttgttctgtggaagccgttttctgtgtagtttggacatgaatgtccacaaatagctgaatgtgtacgtagatctttgggtgcttcccgatagttcactccctcatcatgccgcacaacttcctgtccagttttccggtctccatccactaatcatcccgtatatcatcgtctaataacattcgtccgcgcccaggaaaatagcatgttcaatcgtaaagagattttcgtacggaagcactcgattgccagtagattgaaggtcagctaaatgactctctacgctgtgattccccgaaatgtcaaagagactgttcaacatgacagccatagggagctacgtacgcacatgacatacgatgatggaagttgtgctaacagaccaagctcttaaattatgccattaattgagtgccacaagatttagttcaagtagccatgttgagaaacgttgggtagtcaaacgtgttaagtaaccattcataatattgcgcatgatccggataccgttgaagctatttattaactaacgttgatgtttcgggtagttggtgatcctaatgccagcatggtttatttaaaggctaaggtgtaagtgaaatatgagagggcataaatattaggccaaccgcctttgtgagcccccctttctactcaaatacctgagtcctatcctcagacagatcacccaaagcgcgctactcttgggaattagcctgttttgccagtgcgtacggtaagaagcccccactccgcaaaccccattccctcgcaatatctctaataaaccgagcgggacatagctaggagacaggtgttttccaatagaggaatcaaatctagcctgggccaaatgacatgtctaccaaagacctaacgactaccgtgacgccggaaacagtgcctctcgcacaaaaccagtacgtagatcaaccaacatcaccgacattgctatgtttatgggttgacaatttcgagtaccgagagttttgcatgtgatataattacgagccaccctactgtcggcccatgtgtcggagacgaaatggcgtccactcaaagcatgaagacaacccgaacgccctcctggaacaacgctgccttgcccttagctttgataattccaacattcacactgccaactgggagtacggtggaggctatcacaacagctcatattcctgcccctacacggatcggacctaccataccggctgaagggtctggaaatgtgttgtggtcatcgaccactcgatggctgactttatgctatctgctcctcctagttgtcaaaataattgatgaaagtcgatccatttaatttgctcaacatcctccacggaggagcagaatagggctagctcacgatatctgtctctgtccaggaaaattttattccctgttgtccttttctgcagcgagactctagcaaaaaggaaaacaaaatgttggatattcaaggggaacagcatctgaacatgttgaaagtagacctgttagaatagactgaaaattataggctattttatgatgctgagcaaccgcacctcaactttccacacttcaattgacggtggtggaaatcccgatcagcagaggttcactgtaacctactataattgcggcaattcaccaccacacttaaaaatccaatgtcgttatgttgttaccaatggactgacattgcgaagacgaaggtcatgtgtcaaaataatatcttggagctataaatggttttttgacccttgtccatcctcgctatgttttttcacgccgcgaagccaacacagcattatgaatcgcgctaagatcaaacacagccgaccttctaccgtgtggcttgatgagtcggccttctgcaatgagcagctgagtccaaactcaacggcgtctccgcatatccaacccccaacaatacagaaaatggccaccgccgtaatcacacctggttcaatggagccacacccgggtcgcccgaacgcaaggatcacacaactgaatcagaacccatgggatacttttgaacctgccgctggatcatcccaagatcggtctctgatatttgcccgaaataagtcggaaagagggaagttggtgcatatccaacaacttgaaaaacagttctctcccgccacaggtttcctagaactgatggaacaagtcgcccatccaagcttcctaaaattgctcgaatgttaccatcatgatgcttcatgcacattggtttgggaaccaacggaagtgtcagtcagtcacattttagcctccagctgctcgatcaccaccgatgaactcgttggaattgtcaagccggtgagccaataaaatctcttgcgggtgcattcgaaattaacttggaataggtactagaaggaattcaatatctgcgcggggtcgggcgagcactcgctaccctaggcccggaaacaatcctgcttacgcggtctggtgatgtcaagattagtgaggtatccgcgaatattgcgaaaattgataaaaactgactttcaatagtgggcgtcgagaatagctgcgaaattaaaaaatcggaaatgaatcctgcgacgataaaattatgcgctctagccgatgttgtcacgaaattgatgttgaaaaatcgtacatacgagtgggaaacggagattcagaacttaccttgccaactggaaagtatctccgtcgaggaaatcttgcaggtaagttcattccgtctcatcatgttctcggctaatgtgacagaatgagatgtttacccgagattcatgcgagggagagttgaaattgttggtcagtgtagccaacaagactgcctatcacggtatcaaatcttactatgctcgttgctgaaggacaaactcattggcttttgctcggctgttttttgaggcctaccaaattgagaaggaacccgcgatcctattttccatctgtgctgttcggacaatatattattggtgcataaggaaagctaggtacggcagattggtagatggagcatggttcagacggtggtagtttcaaacgctcttcaagcgaacaaatatagtaggctcagggtagcccctcgactacattcaatttgcgacctgttgttataatcagttcttacttatatgacccatcggtattgccaatttatttgcattcgtttgcattcgtttgcattcgtttatcgcctatttaactagggtctatgtaacacaaggagtgcgttgcttctgttgggatttgagacataaccatacccgctgggcaaaatactatcattatctcgcagatgtgctccccgctggaactatattactgaaactagatttgtatcaacaaagggaggtgaatattattagactggaattttccacttcacagacgatctggattgagctagatgggtctgaacgctcccgtctatatatctctgcgatgcaggaccccattgctcatcagaatatttattttatacaagtttagctaccctggcagccacacgaacaaggcatcgagttggcattttcagtagtggaattagcctcgccggtgtcggctgtatcggtgatgggaattgggccgaatgtaggatttccggtgcataccggttcgccttcttgcggtcgatatttgctgtcgccattatgttcaacaatacttccaggccaagggaagtgaatgtctacattttctctggtaatgcaaccattcacgttggcgatgaacataggaggaaangccagcgattgtttgggtntgttgtccgacgaatttgacggngactccttagccacagtgangggtgcgcagttcatgtacatctctcgattgccgatacgattaaaccatgtccangccaaggtgtatttcccgggtgcaataccgtcagggatcgcgaagcggagttggagagaatggtccgactcggcactcccatcaagatttccaggtccttttgcagggcatcccccttcgtaggacttgatgactttccattccgaattctttgtcggctcgcgatcactggtgaggctcacctggcaggacccaccgccatgggtggcgctgcccagaagcttgatggaattgttgctcccagtccgataagtcgcctcttcagtcggaacgataaagtcacctggggatatcttgcaaggaaagtcactaccatctgctgcaagtggcgagttgtcaagtgtcttcctactagatccgtagggctcgngagacgccattctcaggtgcgcatatgtcggcgaaaatgcaactgcctgcaaaagcagacaccatttcacgagtatcatagtaaaaggcgagatggcctcctgtggtcaaatacaggttagatatcatgtagctgaaggttatactaggtttggcagcggcttatatatctccgaagtgcacatgaatggaaggacgcttgagctgttgaggctgccgcggatatgtgagtccatcacaagagcacagtgcngnctagtnntgctgtccttcggctaaaagtgcgccacagcagataanaggtcgatatttggctttcgagaccaatgtgattgtaccgattgagtggaacaagtggtgagcccatcattgcgatanaatgttctcacatncgaaagggaaatggngttccccntttaagtgagtcgggttnactcaccactccttgtacgacctgncgcgagttcaacgatggactttaccaaccaacatcccntatcaagaccaatgctgctaacatactgtccctgtgttgaatttcccttgtcacaaaaatgcggcgctcgccacggaccaccatttatctatcaagtcactactaccaaactcgactcctaaaatcgtccgctcaattcctcctaggttttatcctcctacttcttgtccgctctcagtcagagccagcaaagaatctcaatatggatgttcaaccaaagctgaaaacaaacccagccgacgcagtgaatcaaaaagcacgcaggagaagaaagtctcttttcaaaaaggcatcggagtatagttcggaatgcgatgccgatatccatctcgttcttcggatgaagaaatccgggaagatcttcgttctggcctcaaaaacaaaagattggcctctttcccaacatcaactagtaagttcactgggtcatcgatttcgtcgccagaaaggtaataacttgattccaagaggtcttatcatcccacacccattcaagtgtctccaggcgacccagagtccaagccgtgaatctctaccatgctagctacaagtgtctccctcaattggatgcccttgtaggggcctcctgactagttcagtccaccccttgcaacctatatccctctaaagacattctcctcttatcactttgtgcaagggatcaactcccccaaaggcttctgctgtgctctactaattagaacatgtgctctgggccctgaagactgttcaaagtcgatcaacgttatgattcatgtacaagtgctgcgggattgtataacaaatttagtcgatcacgttgaatgttatgaacggtcacttccactgaagggaccaacgatgaattcatcgtccgaaatgtaaattctttaggaatcagaggtaaataaatctccatcacagttcaagatttgcgctcgcctagtcagataataattgccttgctttacgctaagccttccgtcagctttcatgattgttccaagtacgaattgcaatgcaggctggttgctcaatcaggtttacctccagtggcctgaaaccgaaaggcaccttggcaaacatcgttggacaacgaacttgcgtgcagatagtacgagacttgtttgatgacatatcccttgtatactccatcacttatctatacatgtatttcccattctatcccatcctgcgagtggtctatcgcgccgaccgacattgacaacattcgcttaacaagcgtagaacagcatcctcctaggcacgatgcatcaaccacaccgtctaaaaagtcttggtatcaaacgtctcagtaaggatgtcgccacctactaaccagcaaggttgtacggaattatatatgcctggcataaaggcacaagatccccccaccgctgttgatggcccgaaataaaggagcaggtcttcgtcgtggaatgctcagacgtcgaactttggtgagaattgtgacagggtcaattctagcgcaggtagggtttctgaggagtcactcggaaggatgtttgagtggccctctgatagtgttgccgatgaaggagcgtctccagggggcaccatattctcgctcgacgtctcgcgtagcgcttcatcgtatccatagatgctgcttggccgcaacgaacgtggcatatcggtttgggtagctccagattgcgagctcacatccggtgcgacaactggttgtgaagaggccatgccaaaaatattcttatcgtttgatcgacggctgtcctcgggtccatgctggcagatgcaggggttcgtacttgtcagcaaccggagacggttgagcacagagaattccaacttcagcttgacgctgtacaccaccgtcttgaagctcacttgaatgtagtgtagcttgcactccgcgaggagtagtaaaacgttcaggattacaacgaggatgttgatgcaaaatagatggataatggcgttgcggccgtcgcggccgcggattgtaatggcactcttaaaatgatgcaccgctttatatatatatatgccacagatgacgaagtcttgtatgcaaaaaaccgtcgattggatccggtcaaatatcgcggcagggcgagcaaagcgtgcatcgccgcggttgaggccgaagaaaaaaacggtcattgggatatgtaggatgcaggcgtttgtaatgatcatccataggacccaccgcacctttctcatgtcggcgataacgaggtgcagacgcgagtagaggacgacggcttggccggtaaccatggcgtaccatcctatcatgaaggggatggacgtcgagatgttggacgcctgagaaacaaaacgagccatagcaggaatggcgtgcaagagaataccccaggacgcaaattgcatgctccagaaatagaggccccggtagcgcttgaatgtgtcgaacgtgacaatccctgtttctagggcattgtacgcgccgatagagaacattgacacgatctggatgatggagatgttctccatgaggatggccccaacatttggtggcaggctggtcatgagtgtatccatggtctaatatggcttaacgagtacaaaggctagaggtatagaggataaacgatccgcagcttggtttataaaagcctccgaaccgagaactgtcctcccaatgagatcatgacattgtagctagggggctcctttgaagccctaaaaacgtctggactcttatcggctcgggatatgcttggctgggtttccagtggtctgaatgggtctaacgggtagctatatcgtaaccagagtggtttgtagttggtactgagacatcaaattgtttttcaattcatgccatagttatttttgacgtgaagtgaaagctttcccaccgttcgcaagtcataggcttagtttcacgacgactgcaaaaccgagggcgggatcgtcgacacgtgactgatcgcctcaattccgagccttgacaaatgatttcgatgaaccatggaaacactgcctcgggagaggaagggattatccatggatacttaggatttagtatcgatctcattcgaaaccttaccaataaagttctgctccacctgcttcctagatcagccatggttgaagttgtccctacagtcataggagaatccagaagaatcgggtatgctcactacgggcgtagacctttgaaatattatgaggtagcactactgtatccaaaatattctcgatctcccgagtctgaggacgggtagaatgagccggatgctggaaaaggagtgggaccgcagatggtcggcccacaccgccgactcttgccatttccgtgagccaatcggtttctcggctcttcaggcaagaaccagaaaatatgattatataatctcagctggtccgttcaaatccgttgaatgtttataaactgtctgctagggttataagaactggcgatcgaatctgagcagatagaaagcgcagatttcggttttaaagggagtatactcattagggaagctagtacaggagaagatacataccttcttgaacatccttcaaaggacgagactaacgagaaccaacaggtcgccactcgacggaggaccaagttattttcttgtgagagcaggtaggagaacccgaccatggattgctttcagcgtaccattcttttgctggacacctgcgtgatattccaaatacctcaactgccgtacctgtgagggtggtcccttcagcaggaccaagcaacaaaggtatgttgcatcattactgttctgtcgagactgggcttgtgaatcgtgtctgaccattgaaaaactttgctatttcttctctgggctacaaatagaacctccttgatctattgtcccgtgggtcatcgccgagttttttatcacaggaccgtaccagcgttggtccgtgttcacgcgcggtgattgattggtcctgcaagtgcttactttgtccagggccttatcagagtgtgatagtagcgttacaatcttgtggggtaaattggcgatcgtcgtggaccacagctaatgagccttggtagttgaaatgccacaaatggttgccccggaaactaagcccaggttcctgttataactttttcgacacgatctagatgtctcatagccagttatggaaccgtggtgagcttcgacgaaggaaaatttagcacgacagcggcaatggttggtccaacttggattccaaatcctagttccatataacgaagccctatatatgtccttccatgacttccggattgtttgcttctcagaatgaaatggaagactttatggcccaactttcggaaactgttgtaatagtgggaccgtgtaaatagtggaagttatatctgggacaatagtacaactacaccgcatatggctgaggccagagggcccttcttgtttccaagagcggctcggatggttcaactctggtcgatactgagacacaaccgtatacctcaacgtagatcccgatgtggggcagtcgatcacttcctccacaataaaatcgcagatcttgtgctttcgcgctagcgcaccgtggggcccctgtgtcaatgggcacttgattctggcacagctgcttggcaggaggggagtcacgctttcacctcgtttcagggctttcaattgtccccacctaaacctttaaagtcgagaccccccagaaggccactgcgatcaatcataccttcactttgcccggcgtctcgctaagtccgcattgactcaccagacggaggatccagcatggcaaaaagccacaagccctctcgacgtggtgcagaccgcggtcctgccatgacgaagcccggtactggcaggtcatgtgcctcttcgccatgttctgctcggtcgactgtctctaggtccaaggcggaacgtaaccctctcaaagcggcagggaagctgcacaaagggctggtaggtcaatctctgtttttcatttcctcgctcgagccttgttggattcttttacttatcagatcagttatttatgactacaccttgctaacgctggctattagaggcattctacagcgaaaagtacccaaaagaaagaccatgaagcgacccatcgaaagtgcctagatgtgatggacgagattcaaatgcagtttcagctggctcttgaggagatagacgcagaaagagcccatgattcccagtcgatgcagcgtttgcatgctgaaaaagcccaggacacctcgaaactacaggaggctatcacagcaagagacaaagcgttgggagagaaccagaggcttgaaagagagctctgtcaactgcagcaggcgcaagagtcatctcacgccaccatgcagggcctggtctcatggcacgatatccagccggtcttgcatcaaacgcatggcgagctagtatcggcgactactcggttctggaacacgatcgacgcccttcagaaccgtaggttggcatcttacttgcctagctccggggggatccacggaagttggcccgagcaggatggcccgcttggcactctaggtcacaatgccctacccgggttttctgcttcgagtgattatccccttgtaacccaagaggcgccagtttcaatcaaccaatattaatcacttgtgtgaaacatggcaaattcagcgtttctggcggtcctggctttactatggaggaaccggctagtcggtttatatagccactacgcaggtagatagctcatgagattatcttcagtaacgccacagccattccatcacaacagtaaaaatagaaaaaaaatggttgttgtccgatgttctgccgtggaaagaatattgacgtaaatcctttgacgattagactcgctccgccaagcgcagcttggaaggcagagagaatgttccatggtcgctgaatgtggttagcggcagggcccacagcccggggagatgatgcgctgatccgtcggaagcaaccgaatctgaccgatcatgaccgtggtccccacccagtatttgataggcaatatgactcggcgacattcatgaagaaatttggctgtttccttggcgcttggttcacatatgcttttcttgccacttggcagataataggatttcaaacganagcctacgacgctggcacgaactacngtatttttctggtccgcccacagtggccgaaactcaattgagcgggctacccgcgggtcatgagatttggaatactctaccaagcgtacgacagccaatctatatctcaaattgatccaccactgaatgtggacgtgagggtccagtgggccagggagagggtagtcgataaaatgatacccaggcgctcgagaaaccttaatggcatgaatcagtttacaactgtcactggcgaggccagagaattcgtcccaaggaattcagtttgttacaccggaattatagtaaatatttgtctactttccgcagccttacggttagttacagcttccagtctgccccagtgagatatgattggtcgcgaagcacaatgcgatggtgatacctcagctaacaaggctgacaacaggctctnngatatattctacaaccacatcatatttcgatccagatcactgctgcgaccgaagggttcgcctagttgcattatcctctgtagtactgttcttcccctctttggccatcatctccatagctgtctccacgaccgccaaccgactgcggatgtcctccaagtcactgcgaatagttgcaatccagctgttagagttatccaatgctttttgcatgagcctgggaaaagtcagcctttgttcgttctctgatgtgtcgcataactaacttcgttcggatatctaggctgattgttgtaagcagacgnatcacaaaacattattataggggggcaaattcgcactcactctgcggcacattgtaaggcgatcanattgcagtcctccgcgagattagcctgtccgggttgttccagttcttcttctggtcgcgggcccatactccaggtgtgtggaggactttcctggccatcctccactacgatgtcgttgtggtggttgccaaagnagccattctcctgcaaagaagactcttcntcagtggtatcaccttccgctgaccctggcggactccagatattctcggacncggaggatgacagggacagtgcacgttgtaatcggctccgaaagctttgtcgttgatcagtgaacggaatctttcgaattcttcccatagttggatctgtgtccaggtaagataatgagttctcccagccagatgttacaggagaagtcgcacaagctgatatgaagagtttgttctccaaaccggaggttgcgatcagggtttgcaaggcccactatcttacatccgtaattaccacaattgtcgcttaatttggcaaccaatcagtcatgagattcattaaactttagggaaatgaactttgtaggaaggcaagttttgcctctaaagtctgtttgaggttacattattcagtacccggtggggcttggtctgggaactcattgctgtgttcctttggcgtacagtaattgcattcaagaacaatttccaggagtacgaaattgacagttaggtgttcttatagctagggattgtttcaacacagatggcttgggggagcctgaaatacggagtcaataattcagaattcagactcaccgaaccgattccccagaatggtccatgggtcatgttattgagactttaaaagaattttcgtgaaccaagggtactatcttaactttttactgggacctggagaggatttatgctcacttttcccttctatcaggagctcaagtcgtgctattgtccgaaaaggtcgttctggttactgtcagttcatgcgatatgtcccctcgaagcgaggtggcctgggaggaatgggaggaaaagaaccttctcccctggctggacgctcatcgggcgctgccgtggaaagcccgctcccacgcatattctgcacaatatcaggtgggccgaagcgttgagtctctgcgagggaaaaagtaccatattctgcgcaagcaacgtcgcattggtgccagaccgcttgagcattcaggccatccaagccacccaagccgagcaggagctcatcgctcggccggccataaggcttcattagcgaatctcacaagcagaaggcctgcgcaaagtaatattgaaaaatggtttcaaacaatcctaaccactgagactagccagatcgacagcattgaatcaataaagagaaaaggttcgagaccaggtacgaactaatgtttaccaccctttgaccacaagctaatcacacatcacaggccgcgcgatgccattactccgccctttacggcgtgaagaatcacgatcgtcgtcgcagatttggaactatgtacatcgtgtctgtgcagccaggaagctgagataccgatgagcggaacatccatgctaccagcagttcgttggtatctgcgctacatcgcgatctcgaagcagcaatagcgactatctcgatgaattagtgttgttggatgttgctacgaacgcggaaaatggcaaacatggcagctgagcaatcaagctactgcatgattgttgtatgtgcgaatacacatattatcaaaatataaacaagcaccattccttggaattacgacaatagcgagggagtaccaaggttatagtttgacaaaagttagttccccagagatcgtagaacatggccgggatcgtcgatcgatcgccgaacccggaaaataaagttcgataagccatggaaatgctccctcggtgagaggatgcgggaggatgcggctgtcccgaatgattctcatggaaagcttatctaaacagcctctgctacacttgctttgtagattgctagcccaaaaaaaaagagatccggagcaggatcaacaaaaccacagtctgctcatatgtaggatattgggaaagggcaatattttattagaagatactctacattcagcgtcattatcgagacgcgcagggtgcttaggatacagtttaggtgccgcaggtgggccggcccacagcacccactcccgggagccaatcggtttttcgggtttagttcaaaaaccggagataatttacgtaagctcatgtgatccactggcattatttctacaagccatctgctagagttaccagactggcgatagaattgggcatatggagaggaattgtctggctcgaagagagtataaccagtataatcatcaggggaaagcttggtgcaggagaagatacgtagcttctagaacgttctacagaccagataggcaaagttctgcttcccacttgacaggggtacttactttccaacgactgcgaccaagagaacacaaaagaacacaaccacgggtcgggttgtagcctaccattctgtcaccaaagtctgtgtattcttccaaatactcacctgccccagcagtacctcctaggcaataatcccccgtaccatcggacactgacggccgaaagctttgggcttgtggatcgtgtctggacctctgcaattcgttccagtttctctgcgggcgacaaatagaacctccctgaatctactctcccgtgggtcgtcgctgagatctgcatcgcagaaccgtacctgcgtctgtctacattcacgcgtggcgtttgattggcctgcccggtcctatttgtgtctaggtcctcatcagtgtgatagtagcgttgcaatcttgcgacgaggtggcgatcacgagagcctagctcgtgggccttggttgcatcagttcacatggttgtcctggaaactagacccagtttcttgtgagctttgcaaagggtccggaccttttttggctatcaggtcctcccaaagacaatctttatcctgagtctgaaagtatgccattgtctgtgcgcccaggtagtagcgatcctagtaaaggcaccataagttggctgcgagtagaaaggaaagaaataacattcagcggcgcgggcctagagatggacaggattgataccagtgagaccaaagggtcctccggccaactgcaggtacagcacagcgtttccgtcggccacaaagtctccaacccattatttcggcatctgttgaaggatatcaaccctcatgaaagagacggtgaccgtggttaaaacggggagatatagaatgcaagcgcgttgagcgatttccttgcaaattcggtgatgggtacgaatcttactttcgcggcattactttctcctcaacagtcgatgaaagtgggccaccagacccaacgcataattttgagaggaataccaggtcgagacttggctctgtaggccacaaagtctctaaacaccccttcaacgcttattaacgagaccgtgactctcgctaccaactgcgcaactggttccttggtagagacgtagccgaaaaaatataaaaggagcccgattcctagcccaaaaaatatcaggacttcggtcctcacactccgttgtgtcatggtgtccctctcttgcctgcgggcttgagagtctccgtgaccacggctgtcgctgccacgagcccagtgatgtaagacttgcgctccctcgctgccacgagccccgcgagtgtaaaaaggtgcttcgtaggataggtctgcgtgaacaacaatcctcgcaggagaccgctgcgttaacaagttctctgcaggagaccgctgcattaccaagttctccgcagcctaggctctgcgtcaacaactgtgtctcgcaggggggtgctgcgaaaacaagactaccccgcaggataggtctgcgtgaacaacaatcctcgcaggggggtgctgcgaaaacaagactaccccgcaggataggtctgcgttatcaatatgcctcgcaggggggtgctgcgtcaacaagactaccccgcaggataggtctgcgttatcaatatgcctcgcaggggggtgctgcgaaaacaagactaccccgcaggataggtctgcgtgaacaacaatcctcgcaggggggtgctgcgaaaacaagactaccccgcaggataggtctgcgttatcaatatgcctcgcaggggggtgctgcgtcaacaagactaccccgcaggataggtctgcgttatcaatatgcctcgcaggggggtgctgcgaaaacaagactaccccgcaggataggtctgcgtgaacaacaatcctcgcagggaggtgctgcgtcaacaagactacctcgcaggataggtctgcgtcatcaatatgcctcgcaggggggtgctgcgaaaacaagactaccccgcaggataggtctgcgttatcaatatgcctcgcaggggggtgctgcgtcaacaagactaccccgcaggataggtctgcgtgaacaacaatcctcgcaggggggtgctgcgaaaacaagactaccccgcatgataggtctgcgtcaacaacaatcctcgcagggaggtgctgcgtcaacaagactacctcgcaggggggcgctgcgttaccaagtgaactccgcagggggacgctgtgatgacaagtgagacccgcaggagaccgctgcgttaacaagttctctgcaggagaccgctgcattaacaagttctctgcaggagaccgctgcattaacaagttctctgcaggagaccgctgcgttaccaagttctccgcagcctaggccctgcgtcaacaaagcgcctcgcaggggcatctgcgacaacaagcgcctctagcccgtgcaggcacctcttcgtggtgctagggaccagtattcgagtgttccaagagtattcggagaagcaaagacctgcgcaacatcttcatcgtctgttcattgttccgaagggtcatcatcggatacatagaaggggccctagttagatctttgccaattcaatagccaaaatcataaactaacaactgaagcttcttcagtaccaaatgacgtatttcacattcctttcccttggtagcttgtgatgcaatagcttcctcgctacaatagaaattggcatctttcattcagatgtaggcaaacagagatgggtgttttctaggaatgcttgttgcgttgaaccgttagtgttgatgtgagtgttgatggtgagtgttgatggtgagtgttgatggtgagtgttgatggtgagtgttgatggtgagtgttgatggtgagtgttgatggtgagtgttgatgtgtgttgatgagcgtggtggtgagcgtggtggtgaatggtcgggcggtgaaaaaggtggtcaacgcctagaccttgccatcggtccatgccaccctcggattatgtaagtttcctgaatagggggttcaacttttggaaatctatcacttgtcacctacccccaataaccactagtatagcagataattgatcataataaaggcgaatcctagtatgcagtataactagtatgtcgtgtttataataaatttactgatgcgctggtaggcattatatggtgagtggttttgtaggttcagcatgttttgtagtcatatatatatttacgcgcaatgcagacgcatcacaatttctatgtatttcggatcacactttcaatttcacttacactggatagtccattgcttttactaggtttggttatagctgaacacatccatggtatacctttctactcaaataacctgaatacgtagtactataggacatatacgtgcgtggctaaacattataaaattataaaatttcatgtgactgaagtgcttattagtaagcgacacataggcccattaaatgacacggggctacggtcaaccgcccgcccgcccataggcagggggaagtaactcagtgcgaatccatgggcctcatggcccgcggcgaggtctatcaatgtctcacggacgtagcacggagattttcatgccatctcacccacatggataaatgtatcaatcactatagattctatttcgtaagcgaaaattctagtcccattctgatcactcggtgaagttggcatacagcctcaatctaatagggatagtagatccactggttcaactatgaccaagcaatacgcccaagacccacgtgtagaagcatgtgatgaggtgccgaacgaatggcttgagtaagatcagccatgcggtaggctttgtgccttgcgaagtcaaagtcatcacttcaggcggcgattgtgagtcactagaccttactctatttcaactcttatatcccagagagcgcaagaatcaaagtaactaccaaagagacaaccatgttgctgagagatttggacaagcaagcaatcaagaatacccggttggctcctactatgctcctactatgcctcggcaacgacggatcatatttcaaccaatcccggatcgaagtgacggcaattgccttttgggaagtggtgtcccaagttaatgcaatcaaccatgttctgctgataagagaacacggttgaaacccgattgaaacccgattgagttctagcagtgccgtctgaaacgaatttccgttgggtgatatccccgcaggagtgctagttcgctcgtagtcgtagtagacaatccggccatccttccaaaagcaaccatcacatgagcgttgattgacggtgggaaatttgctccaggatctaggggctagtccaagaggtcccataaacattctggtttcggacaccaaagtctttatagtggctgcctggccgaacagtaacatgcccacgtgtcctccgcggcgcggtgggctcgacgaatatatgatttattctaaaaaaaaagtcgaaataggggatgtagggaaaacggatttcctgacaagtgcgtgatatgttaggagacgatatgaacgggtaaaggatacgcgcggtcgacttgactaacctgcagctgaagtgacacccagggtaaatggcctttgcagatagtgcttcggcttggataggaaatgcgtgcataagaaccaaccgggtacaccacaacacttttgacagccctcatgatgcagcttcctgtatgcccgcgaggtgattcttgggtagtgagctctcattggcttgcctgtgccccggtcttaccctctcggtttgtacctgagatgaccaatgtcaaattgtaggctaagaatgagaagactttgcgtctccttctccttgcaggtggacttgtgctaacagcctgattgtctgcggaggtacgctcatctgccaggaagcaagacagaacatcagcattcctttgtcttttggatttctaggcctcgaaagccaccaaatgttatcctaagacaacgaggatcatccattcgataccagcagcctacgccacttgaaggtatttggaaggttgcatgcttagccacaggtatgattcgggtagtggtataggctgatcggagttcaggagttgtatcacgtagacaaatcgaacaatgacctgatacgcagaatcaatagagaaagaggccgaggtacgcgacacgaaccttctggtgactcatcgtcgatagtattcatgtggaagggacagagagcatgcaatcgtatttgtataggggagctcgagcagacaagatatttgttcgcgtggcattcgactcgagcgatggaaatgagggtgttctcctgttgtacgatccgagtcagcaaggattgatctacttggacgagttgtgtagcgtacctgttcatggaaaccccaaagtgcgcctgagacgggtcaatcagtttgcgcaatgattatatcggcttcacgactagatcacttacaactctctgcaatgcagtcaccagccatgccacgtcgcattcaagctcatcgcaatctgcactcgcttcaaaaaagccgccctgggatgcacaagacaatttgttgagacagtaaacgcgcgttacgaacccacttgcgataaacattgcacttccatggtggatgaatgtgtcgcgatgccagaggttcaggactccacaatagttcgaaggcggtggggacgagggcggaagacgcgatggagcacgctcccggccgccaccttggtcttatcttcgatctgcggaataggccactcgccacagtatatttcaccgtcgatgatggggtgcccctacaatagtgtgaagatgtcagtggagttcatggttaggggaataaggcttggcgcggataatcagacacagcgcaggtgtaggcgttagatctcactcaccttagcatcgaaatgggagtctcaaggttctatgcaacaaagttcgcacgtagatggccgcaccctgttgttgactcgctatcttggtttgcgatcttccacctaggacatgctgcattgttcgaagcgacggggctaggagtagtgtgtaagccatggctttgcgtggagcactgacggtagtgcagggttatcagggccactctagtgagctcccaaaggcccactgtcaattattagccagtagatcagcgtggatcccataactcacatgttctgatggtcaacaccagggatgaagagaccacaagaagctgtggcccttgccctggtgcattgtgttcgaacgtctacggatctagctgtcccgcgtctttcgggtcagtgcagcttcaaggatttgtgggtccatatacctacagtgtgagcagttgcacttcaaatttgtggtcaaccagagccgcgacagtagatcagctcgctatagcagagatgtcttcgcatagacgccttgaccagctaatccaaatctcgtatctccgatcggctggcgtaaatggggcagtaaatctgcttggaaccacgtctcttacagtacaggaactgtctggtttgctggtccacgatgtatactataaatgtcagtacggtaaaattccagtactcgatcaaaggggagaacttatcgagtgcgtcagacacaagcctgctcgactttgcagaatcaagtgaataaatagtagagcaattgcaggggtagaggacgtaattataggcttctcggcttctgtcactcaccgaccgggttgaaagtgttgaaggacacatttcttaattgaggcctattgaaaccacgtctccttttaccgcaactatttgcagcgacattcttgatgcctttagatgcccagcgagagaggagagtaagagtggtgctgagagaaagggatgctgagtcggtcaagcaacgttggctgactgttgaatccttcacgtccctcttaaattgaggctttgtgggagatattcaatccgcaatgacaggcacatatttcttgtcctagtcacctcatatgttggcgactcaacgttggatcaccgaaaagctcctacaattccatccctaggaatcatggacctttgtttctgccctcgctttagtgttgtgttggtttgtgttgagctgtgggtctgtccgcctagactgcagaaagcgaggtcacggtaggatgacccgtcaacccgttgaagcttggccaaacgttgtcaacgctcaatttttgagtgatgaccaccaaccttcaaagataaatggtttttattttatttttttagttattttatttattttatttttctcttcgttactatccgaacttccttttttctgggcgactctaagttctacaatgctgtttgccgggtttctgaggctttcaacgaaagtggaagaggcgtctagttgagagagcctcccggaggcatttcgccctggcaagcagttcgctccatgtcgttattggacgctaaacaggcgaacaggtcggatttgttcccacgaggtctatttagacctcgtaatcgatcccttttgcttcttaggtggatagagccctcgtccccttttcgaggttttatatctaaaggggcttaattttgagaaaagaaatcggactcaactgatcaagtaatccattcgacgattccgtccgaaaatgcccaatttcaacatattatattgcatggaccgcgcaacgaattaagattctaataatagggacaggatcgaattgccggtatggattatactagtctccggaaattgcctcctaaggtgcggtattgttattaagtcacggtccataagggcacgagatatgatgcgtttttcgcactcccacgcctgccccgggccagttctgttcaacctccctatgcacacgttataaagaaacatagtgtatcatgcatgcacgcaaacccccatcggtgtccctgacggccagaccacattttttgccagccattctccccattgagccgccgtgaagctactgctgatcccacgctctcccactccctgggagaatggtcagtgtcctggcggttttttctctgggtggtctttcttacattgaagaagatggttggcgtgacatgaacaccgaccactcggtttgcctgtctaatgttagacaatcgcttggccggatgtaaggtcactatcgtctaccttggtcatccacttcatgtcattcgtcaactggtttcctacgttcaattcatcctggctattgaaggtttcggggatcaccagcagagcgagaaccttttgctcgtctaccccgacggatcctgcaatcctggccaggcgctcataagttttattacgtgtttcattcaccacgctgacgtcgaaaaactccgcctggttctggaatagggccgcactgaactgccagaatttctccggggccagtcgaaggactgctgcacctgcttcgtgggtgagggtggacgatgggtgccatggctgaatttgctgccggaagattacctgaagccgagaactatactgttgggcaactgtgggaccgttcgcgtaaaatgtgttgaacatcttggcagagaactgaaaaacacaatgttagccgcagatgtcggagtgaccaaaggcttcgccaaccgggcacacgaatccaggactaatgcttattagatactgaaatctcaatgcaatgtaaatggacgatgtgagcgcacatatttcgagtgtatgctgcgtctcctgcggggctcccccgaggagcttaaggcctgcgtatttaggagggaccgacatgacgttggaatgttaaaattgaagtgtaaagaaagttgaatcggaggaatgtccgccgtaggtcagagtaaggaggaggtcgagaagaggggaagagcgaagtgttgcgtcaccgactcattcctctcacgtactgtaggtagtctagattctcctgtaagagttacattacttttcgaaatttttacaccggcccactcttgaaacttgttccccgggaatatattcgaaatgacttaatccattctaggtcgccgctttgtgcagtagttaacgtaatccacaggcgagcgcccatctagggctatagttctcggccgtggtccacaatagcaacactacgcgttaactaactatgaagctgccgacctattgacatcacatcacaatctggttttgattcctagaacggaatatatcttattgaggattggttcgagatcggcataagtcagaactgaaggactgccgtctaccattatcaatatttccaatatcttctccctcatacaatatcatccttcatagattatcatccttcaacagccataacacggcattggttttcagaaattatcctgtgcgatggctacaattctggagcagccgagtaccataacgctttccgaatcagactcgcaattcgtaattccagcagatacggtgtggtcaaatccctcccacttcatctccaaacaatatcagttgctctcccaaccgttgcacgccaatttcggcggcgaagatacgggaagcttgcttttgaaacaactattcagacccgaggtgggccccaacaagcggcggcgttgctcgaaggctcagtctcccggagacgttgtcagcccggagaggtcccggtatctcgaacgtaaccgcattgcttcaaacaaatgccgcctgaagaagaagcacgagcaactcaaaattcagcatgcgctgaacgacgcgacatctaagcgaaacgcacttcgagctgaggtgaacggattgaaggaggtggtctggcagctcaaaaacagggtttttgcccatgcaaaatgcggagatcacccggatcaacctacagctcacagaaatgacacgaaagctactactcgagtcgagctcgttgcgacgtccatcttcgtctctttcgaatatcttattctctgatgggtcgatgggagagggaacagcaaccgccctatctacagcctcgcctgtgtctctggcggcggatggcacagtggctcgccccaaaaatagccccaatgcttttgattgttacttcaatctacaatagatattatacacgacgcactataaaagacccagaattgattcatgctacatatgaaccatgctgaacgtagtatcctagattaattgcaatatgtctcgcaactagcgtcgccaccttcatgttccgattgttatcacatcaaagattccctagatacgcgtttcggtggcactttgtaaaacaaggcattgatacctgtgaatgataagcacagctctttctcgactgcgaggagatgtacgttgtatttacattggctcggagaaaacagccaccaataagctcaggagggccgaaagcgaagtgggtcgcaaatgatacccaaattccggaaagaagcaaactaaaataccatcggctttaccttgctttatagcaccgtagctgacgatgacgtctgatcatctgattcaattaccaccgcacaactgcaaggcccatgttggtgttccggaatcctttctccctttatctctacctcaccacgtccttggcaacaggatgataataattatccctttctgtaagggtctctagaaatcaatcttctggcattggacctgttacgacaaaaattgccttctagcatgctttatcctttgtctcggttcattcccgcccgtcgctggcccaaatcactcacaatgacatcatgagctctgttactgaactgaaaatatcaagcggtttcccgacaggatatgcagagagtaaatcgaagaaatacgttccgagtatatagtattcctcaaaccatttaaccatgaaatgggaggaaagtcggtacatgcatcaccccccccgccccccccaaccaaccacataccagtaaacaattgacaggtgaactggaatgacttcctgttccttttacctttctactaaaaatactgtaaatgtcagttcgcctgcctagcaggaaagttttttttacctaaggagagaagcagtaatcgcacggccgcgcatcattctcccaccgtgtgccacagcgaccaactttctctgagctctgaggcaacgacacgtcatcatgtagtagcccccagacacaacggcatagcccctgctagtttggcctacggccagttttgtggattgtaacttttcggcggagcgggttgacgttcaagtgagctctgtgaaaaaggattggccccaaattgcactggaaatgagattagctgccgcctcataacttggacaagaccagcgctcatatatggtgcatttgggaacatttttttcaagcttagcgaactttaagatgcgctgttcgtcatccatggtgacagcttctctatatgcactcgccagctccaccggcctccaagggttgaatattacgctgtcattattcaaactttgtgcagcacctgcaaatccagagaggcacaaaccaccgtcaaatttctggctgagatgcaatgtaattataagccatcaaattcatcacgtcacgcgtgggagacacgacgcaaagcattggacgcggcgtagagcgcaactagctcatgagtattaactgatttgtaaagaaagtggatagacatatattcaacggtggtaaacttccccttgatgcggccaactgactcattaaccaccgccgcaggttttgatactcttcgacatcttgtcggcttggtacggcgattaacgaccttgccaacccagggtaagttggcacttcagagtgggttgacacttagaaagacctccgacgcatgcagcttctgcggcattcccttaatgtagtccagacgctcaacaccaacgatgagcttgatgccctcgaacttttattccagccccgcaatgcgcttctggtcattctcttttcgaagaatttctttgaacttatttggattaatgccaatcgaactgcaggtaactacccttccttgaatctcgatccagttgggtgtcctgtcaagcccactattgcattagccccatggataagcgcccttcgcgggtccactcacagtaaacgcgaacaactgctcaagaaatgacgagtgtaatcataggtatgtaacgtatgtaatccgataatgccacaatgcgaaacgcccaaaagaatcccattacgcacaggcaagatacggtagatttccctgctggggaaaggagtatgcaagaagaagcctaccttgacactctgcttgctcctcgccaattctttgcgcagcatttcaggcagtagcatcagattatagtcatgcacccagaccaaatcatcgtccctaacttcatcggatatggccttggtgaaaagacggctggctttttttgtatgcctcccaggcgcactcgtcgaaagtcgtttcaccggcgtgataagggaatagcgttgcttaaccacctcaacctcgggtccgagcataccactggaaagtagtggatttacatagaccgctgaggccgctcaccaggcctcctgatgacatggagaagtcatactcgccatcttaggagcgcttagtggtgatgggaagacggttggagtacatacaagcgactggctgctttcaccggaaaatctcctagcaacgtcgcgttgctacaagcatgataggcactgaaaggagtgacgataaaattcgcaaagttcgtcaatgcgaacaccaagcgtgaaactcacattcccgttgtttttggtcaacgctaactcagcagcactggtatataggtgagccttcctagatccacgtcggcattaaaatcatagtacggaccatcaacatccacgggccgggcgttgcggggcaacggatcctcacaatgaatcaagttcttgcaagggacgggacgggaggggcgcctatcttggcattccgtgctaaagcctgcaaaaaatatctcaggccccagcgatatccaagtatctgtgccttggtatcctgcgccaactatgcgaaaacatctcaggacttcagcaaatgtcctttactgatactattgaacaggtagcgatggctctctctggtccagcactctggaagaaatctgccttaaaacgaagcatatattctccaagtgattattcattgtattccccgaggttcagaccacatacccggcgttgccaatccaccttcgtccctagcgatactctatagttaaaccttctttctcactacagtagcttttgaacgtggaggatccgagaccacgacaccatatagtgatacgctgcatcgagccaggtaggccttctgtcatcctacctacggtatcttggatgaatatgaagttcggaatcagccgtgttccaggtaacaaaatgtaccaggtgcatatccgcacgtaagcgaccttgttgactattgcgcattaattgagaatgatataaatctttcttttacacgacagaaaattgacacgacctatccatgcatttggcgggtgacgcaactgtttcactgtaatgatgacgtttagtccctgccctctacagtaatcaatcaagaccactacttcatgaccaaggatgacgtctgtatccgatcatccttttcgcccttttaccatgcccattgaaagttataaaggctcccaaggtccccaggcttttgtgactaaaccgtgaatcagattccttccagatcatccaatagattcaaccaccctaccccattgctttgcaaatatggcctgcaactgcggatccacatgttcctgcactggaccccagagctgcacttgctccacaaaagattgcgcttgcaatgcctgcggtgtgagttcagcattcacatatacctgtccacacatgggatatactaattctttgacaagaaataactgccttggtacactgggaaatttagccttcctgaggggaagactaagtgtcggctgacaatttgaggggataaatatacagtcaattgccagacgtgtgcggtagagatggagcaaaactgctgaccatacatttgcagcaaattgccttgggaaatagccattagagagtccaattccgctctttgcagtattctttacagtatttcagatgatagaagattgaaccagttctgtggctgaagctggtacaatgcataaatttgtatgatacaattattatatatcgaacttggagacatgcaatggtaacaatgaatacttcattcctattgtacgcggatggaatttgatttaggtaagaaaaggtaagacgtagagttgcaatcagcagctcactatgaaaacacgaccagcgcattaggcacaataccgaggatgaacggaatctcagaaaagcaaaaattatacaaccgtgcagtaccggacgtggacggttcagttgagtaaagtctgaaactacaattgcacctcagatcttaattgatattcctaaattcctcatgtaaaatacctaggggtcctcgtgctcgggaattcgctctcagggggccaggaacagatgtaaaacgtgtgactgaaccatccacgactgccagccacttccggcgggaggcgctgggcgcggggtggggctgcgacagttcgccgagagcaaatgcggcagctctatgaagcgtcatcgtaccggccatcgaacacgcttcgaccgtccggcatgacacacttcgtcacaggacccatctacgacacctccgtaccgtgcaacgggcggctctcatccgcatcctatttgcctttcgaacggttgtaacaaccacacccgacgtagaagcacatgcactgccaactcacgttcgtctgcgttaccgtgcataaaccaaaagactgcataccctaccccgaaaacatcccatatggagcaccctacgtcgggcccagagaggatgcaagaattgtggatcgttcgcctggttcccgctatcagaagctttagaaacaatgaacctggagagactacagggaatcgaaatgattgacccaacccgattaccaccttggagacaggagacgttctcactaatggagatccaaccaggtagagagatcgcggtggaaaaagctgaggctgtgtggtcaacctcggatatcttgcaaaataagctgccatttcgactctgcgatcagcgatatcagatattttgcaagcgtccgtgtttattatcataccgtcaattcgtccgactgccaaattcagagacgaatgttcagatccaggtgattagacggatgtctccattgcattaagatattagttcccccagctccctcagctccgtcagctacattggattcgactggccttcgacgttcgctccgtattcagtcgatatagccacttttttttcagctcctatcatcaaagctttactggggagaactattgagcaagccgcatcaaagtgaggtctgggaagttatttcgcctgaatataccgcaacatagtgcagtgaccattatgacctaccattcaacggtctaagcgtagttaccctttccaagcaaagcaagcgacaatgcattgtctttcattgacgaactttaatctgtttgtctctggaggacgatgttcaaagatgaggtctggattaaattggcccctagctgtggtgtcgattatcccctacactactcattgggacccggaattcgatacgacgaggcgctgtattcaaaaatacatcgctggttggccattgacctgaaaaatatattttgtattataccaagtctgattccatgaaatggcttgtataatgccaatgtaagaaaagtgcatgctgttgaagaaattgtggattgtggggcggcgggtcgaccataagccctccgactaactttgaaaagctcaaatcttcaattgcttcaatcaaataacgacattgtcttttgctactaagttatacctcctctcactgtaagcagtcagtggtctagatcacaaaaaaatggcaaaagtacgcaattttccattggtatgttgtgagaaaattaaatctctgtaattcaaaggccagtttataatggatctgcagatgaatatttaaaatatttcgccacctctaccctacatcctttaagtatgttccaaggttcaagccgatgtctcacggactatcatgtcggcgtgggccgtattgtaaaatgtaggggatcaataaatggtattcaactctccgtattgttgtatcggctctcctaacaagttatagttatgggccgccgattactaatctaaaattacaaaatgcataggatcaatgaatcctccggtatgccggtatgccaatgcatctgctccgacatatcatgtgggcctgaggcgtccctgtgattgaatgccagaaccggactcggccaggttgcaactgtcccgaagcttgctttcattttcaaacccagatactgtccaaatcctagacagtgtacgtcattaatctcggtccaggtccttttaaatatttgtggtagcatctgcctcgaagattccatatgtcaataattcgaatttctacgttgtagatatttgatgatactctttaagactgaaaagaataggaagccactcatcccactattccaaattacgttatatatttctgatatctcttccaagacttttatatacgtcgcgtggccaagaaaccatgaaatccgccacaccaagcacctcccgctccatcagcccggggcgggcaaaacacctcgaacgaaaccgcatcgccgccaacaaatgccgcgaaagaaagaaaagagaacacaagaaaatcgagcggcgcttcaccgacgaaacacaaaagaaagataccctccttgcacagttgaactgcctacgagaagaagtctgggatttgaaaagccgcattttccaacatgccgagtgccatgaccagcgaatcaaccagcagctagatataatgacccagactgtccaaggaccttcgaacccggatgtccacaattccagtctgtctgccagctcatcacgctcattttccactgggacgtggtccgatgagtcggtctcagatggtgcgaaccccgtcgaaacggtcgcatataataacgataacgactggacggtgttgcctgatatagcaattgagtttacaactcatgaaccgaatggttatgaaccaaatgggtttttgacggattcgatttttgataactttattgatgcggaaaatgggttcacctgacatctaatcttcccttgtatggaaggatattctatcttttctagcgatgggcgctgtatgttaatctaggatcacgaacttcgagcactgaaaatctggttggaaacttttgagtgattatgaatatatatccagatctactctgccatgacatggatagtatatgcgcaatacatttcgaaaagtaataagataaaatataaggtttgtgaggaaagaatactcatgatgttgggacgtatgctacatcgtgacaagttcgtgtactgtagtagcctcgacagacttgatctcgaatctagcccgagccattgttatttcacaaacgttcgggtcacatgggttacataagcatacacggagatctaccctatggaagaacgaatggaatggatgagtgatccttccatgtctgtgcagggcgtgctggatggaccgttatacagaaattccatagactacaaaattgccggagaaccagctcgcctgatattcgacaaagcttaacatctattgccaacccgaaccgggaaatagtggtgcaccgtttgcctccgccgagatggaccgtatcgctgtcgtgacgctcctccttcggtggcattgctattaccacccgaggcttgaactgcctcgcaaggtgcatctctgtacaaacattcgctccatgtgttgaaacgacgcctagaatgcccataatttccagctctgcggcccttgcggatccctcatgccccatcccgaattgttttttaattccggggagtcgatctgtaaacagccctggcggaagaattcagtacttgagaatgcagtgtagcgagatcgcaatttctttttccttggagccatacatgcaagtagtcgggtaggtaagtcatagatattgaatcaaagaatttagagcaggttgtccccttttggttgtcgattatagaaccaaagtttttggactaatttttcactctcttacattatcttgacgccaaaagaaaaggctaatttagttacttcatatttggtctttatgtgacacctcccctagaggatattcagccaaagacagaggcattaagagccaattagaccttaccaaacgtggttttaagttcggttttttattttgagataacttcaaaatgaaactcatgagccataactgggaatatcctgcgattcggatgcgttccagccgtcagatgcttaacgcacgtgggcctttcggccggctttagtctgaggataaatttgtcaaagacttggagttctagaaattcatgtgcgcttgcagtatactcatgctagtcgctggcgtaattgagacataaataaggtatgatagcttgttagatgaaacttcatccactctagaacacaatgtatactgtatgcaggctgcgccgaatactccgattatcaaaccgaataaaatcatttgcccagattgccggcagtctcgaaaagcggaacctccccttccgtaacccgagcccgattctgagcccattgaattatttgagcctgttggattatatgtgtctgcggagccattcgggtgtatcgaacaacataagtcagaagattacttaactactcaaatggaagatgatgcaccaaacggatttggtattgatacaccagtctacctcaacagccaaaaccactcacggagacgtaatatccatgaggacaagtcccattcataatgaagttgcttatgttattttgggaatgattgttttgaaccgcgctaattttcctaaaggcacacttggatatgggatgtagccacttgttttgtttggtgcactcattgcccagcatccttgttggtcaagttccagcccaagaacaactatccttttttgagcacttcctcccgaatataaaatcattatctcattcggctgcggctgtacgccgagcttgtgccagaaaatatcggactgagcaaagttatagtatgaaagtaccctggctcaatggcagaggaacaaaccaaatagatatatagtgtgtatatgaagacgggaaaaagggattgtcatctacctaaggtagtcatctaagaatgggaccgcttgctatcccccaacaccagaaagctacgtggtagtctccctagcgaccgggcatatttgccgacatagttacgcagggccacagctggttatagatctggagaccctagttaggaccttaaaaaatatgaagacttacaagataacctctgtattattcggtaaagaacgcggacaaagacgattaggccacggcaggcctcggtacttcaagggtattgtgttttagtagtcgtaagcacgaagttacgcattaggaacaagcacacggatattcgacacagcttacccaatagagatgttgctgtggactgtgcgagaccttgttcgctgcccataggggtcgtgggcactgattcagacgtgggtgaagctgtctaaatgaatgttggtggaaagcgagcactcagcggcatagatggcacatcaaaggattcaaccagggtgtcatcgagaagaggcctcctgttcattcaatgtagtcctttggctgtttgggttgacggggcagagtatagacttaacaaattggcattgtttaataggtggaccagggctagggtatctgctgcagtaggaatgccatctcaatgagcaggggtcccctcactcgttgattcattcagactagggtgtgtggcgcgaaaggaataacaacccgattgctacggacagaaccatatagggcagggtcatccccttggttgttaagcatttgagccattattatgcggtccagcagacagcagacaacagcagggacagaataatcagggccgagagttacatcaagcggtgcgattacctccaattgcgcccattgtcacctcggctgtttcactggggtagcgttacattattctgaaaaagtctgctaaacccaaagaacttccaagtatgcaggagagctattgcgctttgtggtttacgaggggggtcgagcgagcttgatgaaccttcccccactttattcagaaactgcttcgccgcaactgtgcattgcgagcactcaccaaccagcttccctctatactggcacaaaaagctttaggggctcggcgaaggtgtagttacccgacactcattttaacatgactggctgattgtgaatgacattcggtatgcggctcctaacaaataagaatgctcgcagtagtggcactcacgattgaagaacttatagtccataagtaaaagagcttcgcacttcactagcttgctgtttcgcatctgacaagggtcagtttcgatcgaagcatgtatctaaggaaggtgttcaaatgttcttgctcacaactcggcggtcgctattaaacaaggtcgatgttatccaccgagaattccttcccgaaatcgctggctggtcccaagtctgaatttgtcagtcagcgtgtggaaaaagattgggaaattttcccggatgaaccaccacagagcttgaagcaaaagataaagctgacgacgtgtcccagctcaaagcccaacgaacgcatttagttgtgaaagcttgccgagttcgcggttcctggcatacagttacatcgaaagaggtggagtggggatatatggggcacgccaacaagagtgtgagctgcgttcggcagatgagccctcctcgcccacctctccacctatccatacccaaccttctgctcagcgtctgacgttaccaaccgctctctttggtagggagaggttactgcataataccgcttcggtaatttagcacattaagattgttcaaatgattttaactgtattttacgatcgctcaacactatgtcggattaaacaagtccacgtcgctgaaccgggcttccatacgcgaaagcgcacacatgaaattgttgcacgatatacctcaattctgctttgcaataaataagtaattttatttgcttgatttccttatttcgcgggacgcagcgaccacccgaaccggacatcacgtggtttcatctgacaaactcagtagcgaatctgctacgtcccgtcattcttctacaaaggtaacaacttcctcagagataggccgaacgtcaaagctcgaccgcatcagttcgtggtgatctaggcgatgatatcatcccctggggtcaagggtgacatctcttcgaagtagaaaccgacgatctagactaaccaggaatcgtgtatcctatggattttacagctgggaggccaattgcgggcgactttcagataattgaagaaccactaggacggtacatatatactaaacggacatctttatcttcgtttgagcctttaatggcatcctcgaatgggctcaactcaagatatggtggctggagatgcagagccatggtccttttccggacgccgaatcttgctcctctgcatttgttcaattcaggcttgggtgtaacaatggccggtctaaactctgccatttgcttttcttttctcatccccaccctttcccccctgctgcatatagctgtctacaacctcctactattagtccagggaagctacctctgattatcttgcttccactgaacctcaaaatgtccttgtcgggtcgagatctacacttccgtccaatgccccgttcgcgggaagaaaaccaggagaggtacgtgaatccaattgctagcaaaaagagcccactaacagttttgcagagcttttatcgctgcttcacggcgaaaagaccggagcttggatgctcgggtgaagtcggccaatcgcgcttcgtcgctgcacaaacgtcgcactggcagggcgtttcatatcactaaagagattgttgaggaagagggcgtgtacgaggaagtcgacgagcgttaccaagcaaagcgaatcctcatgctgcagaaccaaaccttgcagatcaaagagcaattctaccgccacttgctggctggttttccaggccgtcccaaacttcactcgaaaggaccctccatcgcaagtcggcgcgcaagcaatttggcgttccacccatcgacgagaggcaacctgcagaagttgagtttagatttgtcaagcatcaactcatcctcctcgcttggtgtggctgccttagcaagtacgtcgccaagtactgataaccacgtcccgtcgctaatacgtcatttgaccctaaaatgcaaccgtatataccctgcacaagcgactcaaagattcctgttactatatcagccataccattcttttgcgacgaactgcgggaagatgcccaactacgtgaaacaaacatctgcaccagcttggagtaccgcgaccatccaacatcagcagatccctgcctcggaccaacccttacggacatcggttcggtgcaaaagtggcagcggcagatactgcaccaagcccgggcgcccatccacaccgccgcccagttgctgcagtccagggaatgcctcccatctgccccagagttacctccgcagcacccggctccgccccagtgttgaccctcttaggctctatctcacgtcccgctagtgtgtttcatacccactctctcgtgggttagtgtcgaactcccaactccctctcttcaagcccataatacatacctggtccagatgccgccaatctcgaccgtcaactcactcagaccaaggccacatccgcagatacagagccaacctcggatttctgcccgatatgcagactgttcttggacatgccagtgctgtccaggcaaccatgtcacctaccatcaaggtggaaggcgacggtatcacggtctcgcgacgatcagtacttttactcccaccggtttagccagctagttcgattttgctactgccttataattcttactatctatcacccccactacatgggtaaatcctgttgtgcagggcatttattacctactttttcacgttttttcatatttccctgtattgtatttacctctcttgcacccttagaagaaccttcagcctattgtttcggatgcaggttttagaaggttgtaagacagaaagcaaagcccgtaatgcgtggcttccctcttaaacattttcaggcggtaattccacattgttggctagctgcgatgacaaacctgaaaccaatcttattggcggatgttcgatagttccgcatgggcacgagaaaagagctactatgtctttcgaataatgagaccgtattcgtatgaatgatctccttgagctacaaggcactgtccgaatcggaccatgtataattatccttgcgtactcgaaccgcactgcaagagcttgtcagattcaacaatatccacaaaatatcccacgatgtacctgcgctctaaacatgcagcggcctattgcacgtacaagtactatatgaccctatatgaccatgatgatgtccaccttccaagccatggggatataggtccagcgtctggattgttaagagctcaccagcaccaacgtgcaactggttgatagccgcatatgcccaccagcttctgaccgccgctgcattgagaaatctgcgtcagaagtttgccgggacagttacatgcttctgtaatgaagagtgttatagggagcctctgttggctatttgggcgcctgaggccttaaatgctcttaagagagaaacagattggcatgtaattctacagttagaacatcctatacaagaaatatacataacatacagattttgctctcttcaagcctttggaaataggttgacgaagtcgcccacccttacttcaatcacatcattgactacgcctacccaacagtttgcgccgaggaaaggtctgactttcccgtggctgtagccttcgatcagtaccacttcacttcgccgtctgccgtacaatgatcgagcccagctcgaaatacatatcttcatgacgggaatgaggctattacctgtgcaaactggggcccggcttttgcgtcgttagggcacctaatccgtgcgatcagacgggttcccggcaattatgcttgcaagcacttgacgtaatggatggagagaagtcgaacacagacagcacgtgctatcgggttgcctgacaaacccaaaaaagggaccttgcgcgattttgcgtttgatgtatttggaacggtagcaaacagcaccgggtgcttgggtcggatattgacctcgtggaagatgacatgtgcacccaaccggtgtagagcgcttggaatgggatcaagcttcccatagataccgctccagtactgacggttagagcgtaaccttctagctccatgttataacccaatgtctgagctaattcaatgtcgagccatcgtcgccatgataacgtctaaaatacccaagaggtccacatcgataccgctgtctgccaaattcgccgcagtagaaggatcgttggcaacggggcacacgcctcaacgcgagggatgtcttcagtttgtattttggataagttcttttcgactgagcgacctattcaccagcagaagtaatcgtcgacagaagcggatgcaccgccgtgaaagtttaccatttggtcgactagccgagagacataaagcagcttcgacaggcctacttgcataagcccttaccctatcttttcgcccagttatcgaggcttctggtcttttgatgttcacgacgcctttcaccccgtgtgtcacttattttgctccttaagcaaagatgactggctcttcaactaggacgacaccgcttcaaccgatcaagaccggtttcagctccccgcgccagtgagatcattgagtagttactgtgtcataaaaaacgaataaacgaattgaattgacactccagagccattcaaccaccttttcatggctccaggtattgttcccgcccacgacagaatcacccaactcagaaacatcaacacggggcccgaataactagggaagctacataagagaggttaccatatggcagtcacatacataagggttacaatgatttttgaagggacagaaaatttaaatccgctttatgttcctcaaccgctaagatcggccaagagcatctacccagccgggtttcccacatcccaagtcttcaaccagtgcaataactaatgtcgactaccgggcagcgacttttccttcggtggtattctgtttttaacttgtcacagtgaggcagcatttgcttcgttcatacacggtgttgatttagtggaagcgactatgactgtaaatgttgtcactcatttcatcagtaatgcgtcactggaataggcgcgactagattcaacctcgcaccggcagtgctatactgacatacaaactctgaactatcactaatgtgatgaattcgctagtttttaaactgccttcagctatgacataactaagccgtcagaaatacgtgtcgaagccgatggcaaaatctttgggaagataacatatatagctgcagttgatattttctcgcactttttcctgacaagctctattcaaactttacccgacattaacgaattttcccaatatgacgaccgcagaaggagctaagaaaatcatcgcagaggtttccaaccatgatcttgatcagtgggtgcgcacggcttccttcacgtcggaaattgaagaggtatgggtattccgcactgcctttgggatccatgtgcaaaaatagcgaaaatttacatctgacttttccagtccgttcgtggccatattcaccaggagctgactagttggctgttcttccgtaaactggctgctgattgttcccgaagcaacatttccttgcacggattcgcgcggtgagcatacctttatcatttttcgaggattcccgttaaatacagtcaatactaacactatacagactctgggagcgctcggcggcagagtgcttggctgatttcaagtggctagagaaatatctcgtgtcacgtggtggacgctcgaaccccacaggaattgaagctactacatttgagtggcccgataacccgatcgagccagtcggtccctgcaaagaagcactcttcgtggagaagagtctgttggaagatctggaacggctttgctccttggcagacaaatcaggggacattgcattgtcggacgccattcaaagcaaatttatgcgcaaggagacaaggcatgttaaaaacctcgcagaccttctacagcaggtagtccgagcctccaagcagcctggccttggtctctacctcctcgaccgggaactacggcataccgacgggattgttccatgggatagtgccaatgatacttcccagcagcacgatgataccacggcagtttaaagcagatgaaaccggtcggcctctaggtagcccacgatcatggtctttttcccctgatatgttgtagccgatcgagaagccgaggtgcctaaaaaaaattgcaagttctttggcatggcaactgcggaatattacccttcccactattgtaaacttctcaacatcgaaatggatgggcgtataacccgttagcgactatcattgtttggcgcctaaaatgggagcaattctaaatggtcgttttgtatggcatttaaacagccttgccattgctatgggcgccctcttctgtaacgccagcaccaattacaggcaaatccgaaattcgcttagacagagtatctgctcgcgggcgttaagccgacgccaagcactaccctatccccgagtcaaaacaggacgactggaattttctagtcagctatactaactattgaatttttcagccttgaaatattccccaatattccccctatcgaatgttcaacctcgttaattttctcatggcagactcgtcagcggactatggaagcacaggaattaaaactagcgaatccaatctgctcttggtggaaagcttcatggcttcagaagggagaagataaaggagtgtctcttgaccgaacaatagactttgagatcgagagaacaattgagaactatgctgtatcgcaattcagggaagcatttatacaatctttccagatatggtcaacttaacccgtgtgggcagtgttctgcaaatttaattgaggccggcgcaattttccgcctcattctatgggcagtagtagataaatgtgccagataaactaccagagtatcgggatccataatacataggtgttgtgagggcaggcagataattgacagcattactcgccggaatatgagggcatgcaattacaagtgaccaggcgggcgagttagatcttcggcccacaattattctcagacagattcaataattaaggtggtataaatactactccacggagtgaccctctacatctaagttgcctttctcgttattccatacacctcatctgtaaatcgcagctgacttgtactagcctccgtcatgtcattttctaggcagtcagaagttgaacattgggaacggaaattatatgactatcgagaaagtcatttcgagctatctgccagagtgcacatctctcacctcgtcttcgagagtgggttcagaagacggatggacggccggcagaatatccgtcgattgacacaattgatgaagatgcaaggctgtcaacgcttgatgagggacaaccacgtgcctgtgatagtccccagggctcattggcaagatcgcgtgcggccccgatctggcagtggaatcattcctagcttggatatggagctggactataggttgtgcgcatacgaccacgagaacctcataacagctgcaaggaatttccttggcctcgacgatcagtggtggatcgtagatgtctatctaacagataatgaggaaggtgcgtttgctcagtttcagctctcagagacagtcgttgataagtttatagtgtcgccagacgaccacagaaatgaagcggagtctatttgtcacaaattcatccaatcgctgaaggaacggtatccaaacgacaatcgcccacctgatggactgatctacgagcggattaaccgatacgagggctacctcgatacgcccagggatccgctcgctgcgaataactggtgggctgtactggaggccctcgcgggaagcaagaaaggaaggtatttgacgcaatttttcaaacacgagaccttacaccaaaagctaaattctttgctcgttattccgggtctctggggagggatgcggattgggctacttcataaactgacagccatgcattgcgacgaggtaagtttactctgaaccacaaagccagttccataccagctaatttgtttgcaaatctagccaatagcatgctactgggagttaacctccaccactttttcgagactggttagaggaagagacgagcttttattgctgattgacggagttacggtcgagttgcttcaatctcgcgtccataaagtctccagtaaagatttgaactcgttgcaagtcgagttagaggagggcaggctttttccgaacttctcggaaggcactcgacaggacatatgggcgcgtttgaaagagatcgattatccaattccaaccttgaaaacattcttcaaagatcggctctatctcgaggtggcccaaagtgtcatgaagagactgttcgtccagccgcgaaggggaaagattaccattgaccagggtgtgtatgggaagtatgacactccggttcccgtctcgatggcgctgagacaggaatggctgggctccgacctactcgaattttgatgaatctgcttggaatcacatctcttacaggcactgtctgatttgctggtacacgatggatcctataaatgtcagtacggtataacttccagtactcggtcagagggaagaacttaccgagtgcgtcagacacaagcctgctcgactttgcggaatcaagtgaataaatcgtagagcaaatcgccggggtagaggacatatttatacacttctcggtttctgacacagaagtttgggagaaagcgttgaaggacacctatgcttgttgagggctgttgaaacccacgtcttcttttaccgcaactctttgcagagacattcttgatgccttaggtgtctagcgagagaggcgagtaagagtggtgctgagagaaagggatgctgagtcggtcaaggaacgttggctgactgttgaatccttcacggcccttttaaattgaggctttatgggagatattaaatccgcaatgacaggctcatatttcttgttttaatcacctcatctgtgaacactcaacgcttaatgaccgaaaagcacaagtctcatccctaggaatcatggtctgatttcctagcctcgcttcattgttgtgttgagctgtgggcctgtccgtctagactgcggtcacggtcggatgtgcgaatgctggccagtcaacccgttgaagcttggccacacgttgacgaaatctttgaacttgagaccatcaagatacaatttgcttctacactttctgttttcgatggccgtaaactctacagtcttttgttcatccagtgaggctttcagcaaaagtggaaaaggtgtctgattgtgttgaaaatcccagttaactagtttccattaacaactggccattttcaggctccaacgctaacctcaattcggggtgcaacgtgcagatctcagactcctactaaaggaagactagtacccttggctgtatgcagtttggtcatacttatgctgccctcagtatacaactcatatcacactgcatcggcgtctcgacattctaattcagcctgctttcagccagtttttgcttcttgttattgaattctttctgattctttttatcatattggggttatacgaagaagcacataaatagtggcttctttgcatgtatgaagaaaacagacaaatcattcatttactttctgcagtatacaagattaattttcatattcatagtacttttcatagtattatttttgtctctttacatacatgctgtgtagattacatctgtactcaacagattgaaatatatatctcctcaccaagtgttctatctcatcctcaacatcgtgaggattggccaaatttgtccaaccgactcgttgatcactatcctatgatcgagttgactgccaacaacccgtcgaaaactaaccatttcccagtcaaaacctggctacattgattgactactgctgtgttggtaaaactcagtacttagtcacctgcgtctgcataaactgagacaccaaggattgatggaagttgtattgtccagattttcacattctcttacagacagaatggatgccccgaacatctcgccagcccaggaacatgacagcaacaatttgttggcaatcgagcttgtgaaactagttcatccctcaacaattttgagccacgaaccttaccaaactctcacatcccgggagcatagatggtaacttctctaaaacaaattttcgctctgcagacaccattccgacctaattcatctgttgaatcatagacaacaatgttcggaaaatatcttatgtttttttttggaaggatgcttttttaaaagagcgatgacgtattcatctgatcactagcccgaagtcctgccacgccacctcaacttctgtgtctatcccaaaaggcttctgccgtgctctactaattagaacatgtgctctgggccctgaaggttgttgaaagtcgatcaaccttaggattcatgtacaagtgctgcgaaaatgtatgacaaacttagtcgatcacattgaatggtatggacgttcactcccaccaaagggactaacgatagatccatcccaaatgtaaaaggcggcgggaatgaataataaatgaactccatcagagtccaacattggctcacctagcaattggcagagctccctttctagcctctggttttcagccaaggctttgtcttttgccgggtacggattgcctttatttgagctaaaccttctctggtaccctatttcagctttcatgttagttccaagtatgaattgcaatgcaaggcctttctcaatcaggcttacatccagtgggctgaaaccaaaacacaccttggcaaacatcgttggataacaaaaatggctgcagattacgggacttgttgatgacatattcctagtatacttcttcactgagctgtacatgtatttcccattctatcccatcttgcgactggcatatcgttccgatagatcgattctgagacattcgctgaggaagcgtataaccgcatttactcacacatgattcatcaaatacaccgtctaaaacggactggaatcaagcaccgcgggtgagctgccgctaccaagctagccagcaaggctttaccggatcatacctgcccggcatgaaggcataggaaccccgcacctctacgaatggagaatgcggtcccaactttgcgaacaacatgacatgtgttggatcatcgtttggtgattgttgctccgtggctggatattgtggcaattcgagtgattattgctcgggtacaaattgttacagtggctcttgtgtctcttagaggtagcatacgaagccggttaatgagcgtcctaaaactgctcctgctttaagcgaacgtgaacatcgtaaatttaagcataggggtgcaattaaaagggaaattatacacagccactgtctatgtatttatgcgtactcattatttcgaggtactcattatttccctatccgactgggaaatatgtatactgaactgctgagcaataacgtgattattcaggcgctgcggaggcaagagaaataagtactatatacaggctactggtttagcctagcggaatatgacacacacggtggccctatatcttcaaaaacacatgaaactaatggaaacctcaccagcttggtgcgatcgaacattcattccaggcacccctatccgcatctccgaatttatcgatccctccctccacgccatcttcgcccactgtccatacaccactttcaaccagcactatccaccgttaaaacacactctccaatctctgcgatctccgtttaccccccaacggatggaagtaaccatgttgaaagagttccgtgaatgagcccgaggtaactggtctccaatcactcaccctagccccttcctcgtctcggaagaaaccaggtcgtagtgcaaatggaagcacgagacggaaacctgcctcttccatatcataatctcctcgatggacaggctcactgtagagtccagtgggaacaggatcgttgtcattcatgctcacattctcatgtgcgatggagaacaagcgacgaatctcgaggttgagatccactaaccggtctggagctgcaaaacgtaggacgtctgggatgctgtccttttcatgaggtatgttggtaaacctctggcgccctcgcaaacgcctccttatcatgcgggacctctaacccaggtgcgataaatttgaaacgcgggcttcagcccggaccgtgtgagtttcgtcaagacagacgttcagtcggccacgagtgcgttccaaccccatttctacgctgctattagcagccttagacttgaaaatctctgcggtgaaagaagcgcccattctttcaccgaaactctccgcctccaggggctgtcagcaatgcaatatcaataaggatgtctagcgatgctcacctccttcacaacaccgtccgtatttcactgcgagtttctcaaggtatgcggggaaacagccttgactgtcatcctctggcctctggagtgtcgcgagtgggccgagttcggggctgatgtacaatctcaaaataggtcgattttgtgcggctgtttctgacggtaagcctactacattcgggttttttcagacaccggggagttcaaaaatgatatattgcaacctgtccgatctgacatctcatttcttcgagcttttattctttcctctcaacgagaattggaagcaattgcacaagcctgacaatatgaccatgtattatatgggagttaactttaattcgccttttacaaaccccactaacaaagacaggtaacctttcaggctcgccaccagggagcaatcagtgcctgcatccaacagatttatggagacggtgggattgtaatcaacatattcccagacatggtcgctagaggcttcgcgtatgtgtccttctactacaacgcttcatcggatgtttgactaatgtgcgtccaagtgcctctataacagatgcagttctcgaaaaccttcagtccgaccctgtgatttatcgtatcacacccgatagcttctcctaggctcggtgttcgatagccccttctgagtggcctgtaaagcctagcgtccttttgcttcgcattcgctatgttctactaaaacaatgtcatgatttgtggataagtaatcaaattgaccactgtgcttgctgcctccatatgtgttgagaaaataacttctcgctttgactccttgccacgaaattgatccaaaacattgtgttcttattgatggggttcgctccgagcgactgttcagctctagttcatagtacaatgtaacgaatggaataaacgataagccgttactcccatgctggtatatccttttctcctcatttgtttcattccgagcggctggatgaattaggtatatggcgaagattagtaggtataccaaaggtggcatcgagtaagccatctattcctcgatatcactgcatataggtatcgacaaatgtcaggtaagagagatgcttagctatgtctgtagcaatacacgtattgcaatatctggtgaactaacgtgaacagggtatcaacgtcgtatgctcggccctcaacagatcgaaataataaccaagacataacatatcaatagctccgtaacccaccgactcatatatcgtctgtatcgggtaggcaacgctaagtttgaacaaagagacgtaaaaaactaaaagacaatataacagggtatcgttgctctgagactcgtttataatcccttgttcaacgccccgtaaagcagcagtacatgccggctcatagagaaaggaaataccagaacatgaaaagacaaggcgaatgcaactggtgtaaaatagaaatgtcctgcgctgcaaaccagtgcggggagaccagtggctagcaaggtgagatgaggcgagtcgaaaaatttctacttttgtattgtgttcgaacatgagaggcgggacatggccttttgaggtacgggcggtgcagctttagtagattaacgttatttccatgggagatccggatgtgccagtagcatggtcattcggattcggtgtctcggagatgtcgaggattatgtcttgaccctctggaagctggcggacaacatcgtcatccactatgactcgcatgcctttctcatgggcatgcattatatttgagattcgaatttggtcgatttgatatttctcggtaatttgcctctcaaggtcttgaactgtgcgttctgtcaaatatattgcacggtagaagtcctctgaacgcttcgcattcccagaaatccggacatagaagcatgcgactgctaagataattagcaaggatagtaatgatcgggttgcgctcccaaactcaccaggcttagggaattcagctggaggtcgataggttaagtctacacccgcggcctctatgaaaccccttgagacctggtcaccagcgggaaatctttggatgatggtcgggcgatttcctagtctgagtgattgagtaggcggcgaattcgagaagaaattcgtgtcgggaggtgagagcataattgcctccaattcacgcgagtttggacgtcctatattcacatactgaggggaatcgccattatcagataactgaatgggatataggtcgggatcgtcgaatttatcaccgcgtaaaccgaaaatgctcactgagcgagtagatgaaagcatttcttgcgttgtagccaacttggcttggagatcatcctccaacgagactttctccggaggcacatcttccgagtccaacgaccaagttcgtttattacccgaagactcgccggatctctttgcggcagaagcattgtttccccgtttgcgtttcgtaaacccacccacgtctgcctgggaaatttgctgcttaagtttatccatgctcttattgacatgcgcaacgtcattggacagcttccgctcagcaccatgatcccggaaaagctttactttgcagtaagacagctctgtatcacgcgatatacctgcctcctcgcctggggacaatagctcggttttcgagcatagcctgacagcaattccctttacaccttttgagtgactgaaatccgtggaaaggaaattaaaccgcacgggaatgttgcaacccgacgcgccagtcgtcggattggcagtccaagtgacgcagaagccgtcgactgacatactctcgacttgcacctgtcggttcctctgtgcgtcgctgccacattgtaatggttccacgtattccacagctaataattttccacctcgtcgatgggcttctgtgataccgcggccttccttccatagtagccaatatgctgacggtttcatccgtagttcccgctcttcaaaggaaacacggacaaatgttctatatcgaagcggttcgtggttgacgattggtgggctcgtgtcgacaactgagagattgtacgcttggcccttattgagataagtcaccggtatctcactcatgttcttgaccatggcggtcggtgctcccaaagaaacattgaagcggaatctggatgcggtagagcgcggtgagcattgaacagaaagttacagatcaggtttaacccacttcttgccattggcataggacgtgtcaccagccatttgagccgaaaattccgtcgaggccatcaaattggatgctgtttcgacatgtacatcatttaaaaattcatggagggtatcatctatagcatcagatccggagtcggggtgcatgaatgcgcttggcgtatatgacggctgctgagtgtgcatgtcattcattggattcatgaactccggggtgaccggctcaaagctgacgctgtggttattgtgtacagctggcatttccgacaacggggtcaagtgcatccctgtcggactatgcaaatccccagcctgattatggaacattgcacccattccacaagaagtggtggcataaaagcttgtatgctggttggcaggcggtatcatggaatatggagcagattccatccatgagtgcgtcaaccccagttcgtacatattttggggagtgcggtcgttgttggtgatgggtaacttgacatcatgatcctcaattttcacatcgttgttctcggccatactatgagcaagaatagggtcagtcctgatcttacacctattgtctggtagaacaaatgatgttatataccttgaggccatcaaaggctcgcctgccctcacattgcgcgagctctggctatctcgccgagggacaatgtctgagaatgcttgccgaaaccgactgatgaactcagtatccggcttttgagactttctcctgcgcagaaagaatataatgttacagaggaaaccaattatattattgacaacttgagcgtaaaaagctcaccggttgttgaacattgttattttaccactgcttcgcttgagccgggggagaagagacaaaatatgtccacggccaactgccagtacgcttggatgcgtcccgtctgttcttcggtgtcaaagtgtggagtatcgaggtcagggattgtccgaatatcgtgcggagtgttcgatagcttcggattgtgcgaaaccttgcatcaagtgaaaggtcctatgagggatttgccttttgaaggaatactggaagctcggactagatcagaaaggtgaaggtagataaaggagccccgaacagattgcagaacacagcaatggataatgttcccttgtagtgtataatttgagagtcgaggggcggaaggaagggatatgacgatgtttgaagggagaggtgaggagagtggtatggctgacgactttccaatggaagatatacaagagaccccacaggacgtcatccacgaccaggaaagggggccattcgatatgttcggaatatttttcagctaaattgtgacctcggaaggaggaaagcgatcgccaccttgaaactgataaggacagggcgaccactttcggtaagaaaaccttttcttgttatctttttgcttttatttttcctttttcctccaaatagcccccaatgaaatctgcaacacaataattctagaagttctccagattggcagaatatttgctctgaataaagtattggtaaggaggaatatattctggtggaaaatgctaccgaagaaggtgttcaggtatggagaaacctgtcaatttacgcttacctattgggtagtacaatatccatggatagacacatatagatgatataatttgccatagtatacacgatatattgttcctttcattcagtctaggaacatttcctattagcatcgtgacgacaactatatgatctatgctccccattcctagatatataacgcggaatgtggtttattgccaggcacgtgtatacgtatagttctacctcgcctgcgagttttccgaacacgactcatgcctataattacttggaagggaaccttggaaatattccccttgctcgttagttaatgtacttcggaatgacgcttccacattgttgttgggtttagcagcaaatcaatgctatttagggttatatcatacgagaattctatacatgcaatgtttctagctttggtctattgttccagatctcaaatgaatcaacatcacagccctatatacctagtctccgacgtcatactagtgtgtacattgtacggagtacaatatacaaaagtactttagccgcgacggaggtgtatggaaccgtcaatctctggtagtcagccgtggtaggtggtcggcccgaccggatctgcatcgaaacttgatgttgttcggtcgatacatgtctttccgttggaatccattggctgggcccagggatatgtcaattgatgcagttggtgttgcctaaaacattttaatatctgccgacgatctcatcttcggtctaatacggctcaaggaaacctggattcatgcatagaggctgtggtgcgtctcatagtgcaacaaaattacaggtaacgttgtctatacccatgattgtaaagctagtctgctcgccgacagccatggatggcttataatggtcatagcttgtgaatatatgctgggatggaatgtaaggcatgatatgtcctcgatacgatataatacaaccacataccaagtcaaaacggccccagtcaaaacagccccagtcaaaacacctcattgatggaagatcatccactatttcccattgactaccttctccactattcttcgaaagtgcctaggcagggcccagaggtccaattaggactgaggtaacgacatttctccccgagctatcagatttactatgacagtagcaggaacatgagccgtattgaaagtagggtcagttattggctggtctgacttttatgggagcatcgggagaggggctacttttgtaataagccacaataagaaaagtgtacgatacgttcaatttcaatacgtaaagttcgtggggctatacctaggtagcgctgatcggttacatcactcgtgcaggggcccacgagtccacagacatgatggtcgaggttctctacactgagtaccgttggccaaacgtgcacgcaaatgcccaggtgtgtacaaagctcggtaagcaagtgatctgccgtagagccataggccctggacaaacccatagacaaaaatgaaacagaaacccaaagaaagtccatctctccgtcgttgatcggcaattgggaagaggggccgatctacgctgtcttgcagtggtgggtgctggtatagctagtcaggccaaaaaagggtcttgccacttgatctcaggcacgctgagcttctctgatggatgaagtcccacggcacaggttacgcagctccgaaccagccgcaagcatttcccggttctccgcagtacggtttccttattggttgtggctgctttaacctgccgaggtcgcgcatattacactcgctgtactgggataatgtacttatgccctctatgacgagctctagtccgttattcgccctggctaatacatatgtatctgtggaagtataaaaagttccccggcctcgtgggtcgagcttgtgaggttccgacataaccagctctataacgagagatcggcggtggctacctttagccgcctgttatcacccacaataacggggagcacgaccctcgtctggattggccggctaaacgtgccgtctggaacttaatctgtaccggtcgagatcataataagctacgaagtttgtagattgtacctatgattgctctggcctacgttactggttacgtgcttttccctcggcatgttgatcaatcattagggcaatggaaacccatgactttattgctgacgttcggtaaaatcctctagctccgtgaggacttcactaaattgcccgtctcaatgaaatgaagcataacttagttattcgaaataactcgcaagatttctttctatggtccccgatcattttatagtagtcaccgctattccaaggtggggaaagaagctatcgctgaccaatgatttaacaaagacccagctaagcaacataattggcttgtcgttaccctgaagccgaacactagaaagaatcaaattattggaaagtgacattcttatcgatacttatcagtttggaggtaatctattttggtgagataggtgccggtaggcgatcagtggcatcatctgtcggaaaataatggcctagcgttttgcatctgctcttagccctcatgtgatgaatgtccgctgctgagggaggccaatccacgaatgagaattggccaatcaagcagggcggctttcattccgccaatgattacgccccatttcagtgttatggttgtgactcactcggactaccaaggaatcttaccgttaagacgaacggctacgaccgacggtttaatacttcctttttggtgtcctgctcgctttggttgattttgacccacccgctggacggaagggtgaaaagacaggaaaatcctccgtcacgaagcggatgcttggcgatcgcgatgcccagctggatgctgaagaaagttcatgtggacagcaatctatttggcgccacgtctatgatttgatgaaatatgcctcagccgcatgccacttgggcccttatttctggctagacccgaagggaaagaagcattatcgacttcggacgcaaacactctgacgtcttgtcacctatgccgagaaaggtggtatcctggagacgcacagggacgtcccggatgaaatcaagcgcattattcatattcgcatccatattatacgtatcatgcattttgtgcattttgcgcgcattaatgaatcttccgtttcccccggtttttgtattgcggaatacacgtttccactagccaacgtgtacttcaagtgcgatcacggcctcggtcaagcttaagtggaaaatatcccccgtgtgtataccttatattgtagggctcggtaagctctatgattctgcgtgattgtctggatacgacatgtggtatgttcgcgcttaaagtgggtctcctaggctctattgctacactgctacatgaattatttgccggtttctaggaccttgaggcccagttgtacgggcaaagccgctatacatcccactgaacccagatgccttgtgtgtcccgcatatcgtatctccacttattgtgtctgcctcgcgtggctcccgacaaatgtggctagagctcccaggaaataataaccactttccaggaacaagaagaagagtgctgggactagccaagtcaacactaagcccagtatgcgctttttgaagcttatacatattgtgccctttgctacgtggtaacagataccagctcacaatctatatcttctccagcagattacatgcaaacctcgcgattgacccgagacgcttttacatgtactttcttatcatgtcctggaatccttcacatctacagtgggtattgggccaagtattgggcgatcccttgcaccgtgagcggtgcagcggtgcatatgggtaggggatgacgggaatcactgtcaaagcactgtgccgcttgactcccggataaagggagtattatgctttcagctgctgcactagtacaggatttttttggctgcaaagctgttacttcgctttgggtgtaggcaccatcgctgtcggcgaaaattgtaggccacgctgatttccagttgttggatgttcgccaaaatcaagccaaagacgtctcgatgcactcagaaccacatggttcggcactattggtacatcaatggccaaccagcatgtcctacaattaagccacagccgtgcgccccgataaggccttcccaaaagctggaagtggaagcctggcaaagaagccaaactagtgacatacccctaggtgcatttagattggcctgagccgtggaagcccatgctccggatcttctccagacgacaagcggcttcaagcgtattgtgttacatgcctccagtacaaaccatggagtccacgaataattaaagttgctacttgtccacgcagtgtgatccctcaagttccctcactcacgtgtttcgcacggcatggcccacccgaaggctccttgttcttgcacggccggctcaacgagcccgttgctctcctttcaggttgtgggactgaacatgggttaagttccagtccgctttgtgaatgttcgcggtagtggatcgaactgaccgaggtgccttcgtgtcatttttattatccgttagcttcatttgggcgatttgaccggatatctggtgagactataggagaggatctgttcttcctgccgcgggttgaaacggcactgggaaatctgttgcttggcacaattacccggaatgctgtccgtgcaacaagcactagattccggctgtccctttggcctcggatggagcctctaccgtattcgagcttctcggacgctctccgctacctgcgctatccccgctgctatccctgcatccacgggtttttctgcaaatatatcgagtaattacgggtgagattgatctgatcaagcggtattatttgcaggcacatttcagtaaagaccttgatagtgaataatgagtatttgatgcccttcttgttgtaaaaagcctcggaaatatataacctgctttgcatgcggtgtaactccccttgcactgcgtcgccgcttgtaatatgtttatgttgccaagataggacagggcaactcggaataggcaattccttactgttctcttgcaatgtccatcagtcctgtcacattctaacttggggggagtcccagtcattgtgtaggctgatcagtcgtttcccgagatgactccaatgcccgttggaaaaagtgcagtgagctagctgcttctcgtgatgaagctggagaccatcactctatttcctcaggtgtgtgtcagccttcgtcaagttctgattgctctgctgtaggccatcgatgcgcttggacacacacggctcccatagacattatagagtccgacaagtcgagctgcgggaaaggcgaaattgggatcgtcgctcgaggcgtgccagaactttcaaggtgggttaaaacagctcggtcgccagggtgtgtctgctgcgaagtgaagggctgcaatgttcagcaaaagaattgaagccgaatcgtttcacttaccaatggggcatggtcagaactttcctatgatttgtccttttcgctaaggactggcaatttaccgggcggcctatctccttcaatttcctggtctggcgggctgtttcgtatcaaaaacccagcggtcggctcgagctttcctggtcatgtcattggttgctataagttcatcattccttactccatccagggggcccaggtctacaaattgcgctcggtcgcgatcgggatgctgatgcgtatttggctcggcgaaacaaataataatgagctggcctatatagagaggaaaattagcaactaaatgccaccacaagccaaaaacatagctttaagaccatatgaaagctctctagcgcccttctttgtcgtccagtggctaaaattgaattcgtgaaatttttggacgccggcggtagtctagcgcaattggacgagtcttagctatagcggaataatgtctcatttacggcattatcatgggatccgacgagcttcgttcaacattacggcaacagcctaactcgccaaagtcggggaggaactttttagatatctggttttggtgaacggacacagatccattggtctgggagacaatctggatgccccggtattagcggcttgtagctgaggtgtccgatgtgtcaactggtaggctaagaatgaggaggctttgcgtcgccttctccttgtaggcggagcttgtgctaacagcctgactgtctgcgaaggtacggctcatctgccatgaaccgagacagaacatcagcattcctctgtgtcttttgaatttcggagcctgggaaggcaacaaatgccgtccgaagacgagatcatacattcgacaccaacagcctacgcaactttgaaggtatttgaagggttgaatatttagccacaggtatgagtagggcagtggtatacgctcaaattgagcaaggacctgatagacataatctatagagagaaagtgagaaagaagccgagttcgatacgaatatcctggagacttattggcggtagtagtcacgtggaaagggacaggcagcatgcagttgtaccggtatagggaaggtcgagcagacaagacacttgtttgtgtggcattcgacacgagtgacagagatgagggtgttctcttgttgtacgatccgggctagcaaggattgatctagttggacgagttgtcgtagcttacctattccatggaaaccccaaaatgtgcgcttgagacggggcgatcagcttgcgccgatcatatcgacttttacaacttggtcacttacaactctctgcaatgcagctaccggccatgccacgccgcattcaagctcatcgcaatcggctgtcgcttaaaaagccacgctagattggacaagataatttgttgagacaataaaggcgcgcggcgaacccacttgtgacaaatatttcacttccatggtgggtaaatgcgtcgcgatgccagaggttcacctcaagctcgcctagtggctgttttgattccatctccgaatacttcggcgtgtcgactgaggtagcaggtctcacaataacacttttttactcggttactgcgcgtgtccccttatcttcgctccgctcagcgagttctatggccgccgatggattttatatatcagctttgcattgtaccttgctttcaattttctgtgcacctttgcacccaaccctggtgccctgctagtgggcggatttcatactgggacctccgtatctgcaactttgggaaagcgctgaagggagagaagaacttgaatgaggaaattggaaagtggacatgtagctccaggtatatcctcctctgtgaatagttcagcacatagctatgggcggccagaaagcattgtcatccatctaccgattccacttgcgacatattttcgcaacttttatttgccgctgctgttaacaggaatggctacagaatatagtaaatgggaagcatacctatcttataggacgccctgggtatagttgtttagacatgtatacaattcctgtttctatcagccagtaactactcgagtttgttcgtctgccgaagttgacctgtaagctaacagaagcctggatagaatgtgggtgtggtgttatttggtgttgctggtaggctcaccccgcttaccagcctcctaaacccatgtatttcctgcccacagaaagcaagtagaccaaaggaactgctctttcgccgcatcctctcgtatagtctccacgctgtctttttcccctattactaaagtaggcgtcctttggtggtgtctttatccccagtaactccggccgcgtgttatcatccaatttccctggccgtgtgcactgagagtgcaagcccttaaggttacactatgtttatgtctgccagtcaccgcacaaggtaacccaacgcaacaggcataatgaggatgtgttggcggactgacgttaccgatgctatcgctgcttactgtcaattgtggggaaacctgctgtctgccgcgcaactaaagttttgaatataatgtggctgaacttgattgtcttagcaattacacccaaaaggacgaagctaccgaggagaattacacatagcaaaacggcctgtgtaaggtcaccatacgggtatagcagtttatttggcgctgttacgtagatattgtcccgggtgggcgaaatgccgaggcattttcaccaatgagcggtctccaaagtaatccaatcattgtagcatagcaggacaacccgagtgtccgtcaaataacggttcgctccagatccgagggtttaaaggctttccaggcttctgtgctaacttgtcacgatgcggcatatgcctcatggtccatgagtattcttcctgagatttccttttgggaatcccatgtgcaggtagtgtccacgtcgtagacagagttacaaagaccttagttcgtgactgttgaagcttccgatataagattttgtactccgagctgcggtcctgaattgatatacggcgcttgttgctgagaagcgagtaggagaaaaagaactggcttctaaacagtaataggctggtctttaggtgaacctgttaacaccagtataattatatggctcataaagtgcaaagtcgttggacattgcaggcaacgccgtgctgtcgttattgtatccgccgggtccgatggggttgacatcatctgcgactgactcatcggaccacatcccagttgaaaacgacggccatgagcgaacagacaggctgggatcggaatccatgttggaagagccttgcaatacggcttgtgtcatcctggcgagctggtggttgattcgtggcttggcacgcggcgtgttggaaaatgtaaggtgctccaaacgcctggctcatcgcaggcagtacaactgtgcaagaaggatatctttcttttgtgtttcatcggtgagccgccgctcaaactgtttctgttctcttcggtttttttcgcggcttttgttggccgcgatgcggtttcgttcgaggtgctttgcccgcccgggactgacggagcgcgagattgacgaggaggtgggtgatctgtatttcatgatttctttggtgtctttgttatgctacatatgggtgtgacagaaagcgctgtctgggacaataggatgggccgtttttgctttccctttttagccaatgagcaaaagatttcggtaacctacaatataaagtgcggattgatgtaaacaacctttagcgcagatggtgctagaaaagtatagaagagcgtggtatcgaaatcaatgacgtacgtaccatgtccaggatctgcacagggtctggaaggaaaataatagcaagcttcgaaacagttgcaaccggatccggtttccggattagacttgcacgtacttcccctgcatgtcctacatatttgccgataaaggcctcaagctgctgtcctcaccagattattcttgtttgctaacttccctttacattcaaaattatcctcaacctctttacttttccctctaggatatcaaacccaccgagcggggttcatatttcgccggcgccccacctttagcctctataataactcagatctggcagacctattctcctcccacgtctccctacggagcgctttcccttcaggaaaatgcttttcttcgaaaagtcctcgaacgctacatacaccgaacagagtcaacgttccgttctggagggccaaatggacaccgtcttaaacgatacttcaactcacgcgcatccggtgtacaaccaggtgcaggcgtataatggatggcgacggaatttagttaaaggagggccgcgtcagaatcagagcgcaggtatttttcatgggcgagaccttgcaaggcagaatgatgtcaatgttgctgcgacacagcgccctccaacccctgggctagaaactgctagcaactcaggatactctctttccggccctacttacactcatgcggcgccggttactcctgtataccaagaatttgctatctgcaaagcggaaagtaccagtactacccaactgccgaatcacctagatgccgagaaggaagacgaaggctatagaacgggagaaaattctcacaatttcgaccatccaccccagcctaactccggtgtagcccctcccagcacgggggtcatgtccatagccgaaaactcttctttccatcatacacctacgagtggacccattttaacccaggacatccctgcccagtttacccatactgcctcagcgcctctttatgacctcagtaacgaggccagtaagaccgcctacgcggctcaatccggtatccctcctcaaatccactccttgccgttatatattgcacctggcacgatctcgcccgtgaacactttgcctccttccccttctgccaggtcccaaactccgtttaccgcaccagagtcgcaggaatcttcgcaaaccccttcgcaggccctcaagaaatgctgcgttgataagcacggttggccattcgaaggccttagtgatgactccccttgggccccagaggttcaaaagaaatacgaccagtttttgcatgacgagcgtatcaatgtgactgaaggcctctgggacctctttcccatgcaatcaaggttgttcgttggttcgtgctgtccttgctcatattacgctaattatataactacttaaccttatgtaaaggcaaccttccaacggagcgcatcaccaagcgagacatgttccatatcttccataaatatggcaaactagcgcaaatagcgatcaagcaggcctatgggttcatacaatttttggaggcttcctcttgcaacgcggcgctcaggttcgagcaaggggtgatcgtgcggggcagaaagatacgtgagtgccagaaccacccatattcaaacattatgtgcgcctactgatcattctagatctcgaaatttcaaggcctcgaagacctactcggcctgctccagtgcctccccgggcatccccgccgtgtcgttcgcggtcaccggagttgggccgagctcccacgctccctaccgctcgggtcactggagatctatacgaccagccctacgagtcaagtcaactgcctcccaatggtttctgtcatgggttctttcattgcagatgcggtgatcgtcgttcaccgcgatcacggacccctaggctttgccgggctcgatacgagcaccgatcgcgcgacagaagtactgcaaggtttgagcgacgaagacgtcctcgctctccccgatctcctagggttccctattctagggatcgacgctctcgcagtctgagccctagagcgttttgtattgacgaaggtgaaacgtatttgcccatccctcgacgagcccctcgtgatgtaccggatgtgcagctcgtcgtgctggaagagctcgataggttagttgatgcttatgggtccaaaccgctcgagctcattactaacttgattcagagactttgttttttatgtcgaagatgtcttccgcaaccgtggcctacgagtagatgtacttgttctcggccccggaatttcccttggcgcagcagtccatcgccagttcattgaaggagttcttgcggttgtccgcctttcgcgtcccaaccaaatttccaggaagatacccttgcagttgtttgatcggaccgccgggttggacaacgttcgcttcctcggtaagtgcattttatcaaccattttcgcattggcactttctgacgatgggtcatagactatcctgagctggaccctaatatgtccgctgaacttctgagccaccaggcgcaagctatgcaacggggagctgccccgatcgaatttgcaccaaatcccgcttttgttatccctgcaatgtcgcccatgtctattcctcagccaaatctgcctgtgccctctaattatcgcagccttgcgaacctcatttactcgccggatggccctaggattccatctctcttgttggcaacccagcgcactccttattcacagcccgtatctgccactcagttgccagtttcctgttttaacgcaccacctgcacctgatctcgccagtctcatgcccaatgcaaatcctcgacaggttattcccaccactacacagcaatctgtccctccttccaatctcgagcccccgaacgcgcccgcgcccgtcgtcacacaccccaacctcctttctctccttgctcgaggatgggccggataagccacatggccatggaccctctagtttcacatatcctgaacctgatgtaccatctcgcacaatgaaagcaagcaagaataccgggggaaacgagagaaggcacataaacttaaaccaacttcataccgccaccagtgtggtaggatacaaacaagaaatattctgccaatattgagaagtagaagagttgttaggaaagtttctgggggcatcctggtacgatatagatacgagtgaagaatgtgaggcgtgcctgatatgggtatgatgatattcagactaatcgctggtcctcctaagaagttctccgtcgtcccttttagagggttcgctccgtgcgtacgcaaccagttaagctcgtgagcgttcattgcatcggttcacatggttgtcctggaatctagacccagtttcttgtctgagcttttcaaaagggtctggaccttttttggccatcatgccctcggaaagaaagacaatcttcatcctgagtctgaaagtatgccagttcctgtgcgtccagggagtagagattttagtaaaggcaacatatagttagctgcgagtagaaaggaaagaaataacattcagtggcgcgagcctaggatgggcaggattggttctagtgagactaaaaagtcctccggccaaccgcaggtacagcaacgggctgtccattcaagtgaccagatctcaatttaatgtgtttctggaggggccgctcctcgaccgtcccggagaacatatggttggctgcggaagatgtttggggggggaagatctccagcagctgggggcggtggatgctctacgacgggccctgcagtacctggattgacaggttctaccaccttcgtcagagacggattctggagcaattgcaatcatgtatagggcaaggtgccgctgcgtgcagatcactcggtattagtcaaattcgacacgcgccacgcagacgggtatcgaacggctctcgataaactgcggcagttctcaaaaggcgtgccattggtgatggcggctcggtttggtgagtaacttgctccagtgtctttttgcgagctaatgggaaatgcattcatcgcggacgtgtcggaagccccagccgtgctctacggtacctttcaagtaggatcgatgtttgtgggccgtggatctgtgatcagtgtcatggaagaaagacacaaggcgatcggccagcgtcatgagcgtgtggcattggtggggttggccggcgtcgggtgagctggccccataaggaagcctattgaataacaactttagatcggtcatccagaaaattcagacagcgatcgaatattcttgtcgtgtgcgagaattaacgcttgagacgtgggttttctggatccacgccagcaatgcggcgcggttacgacagggctaccagcaggttgccggagtcgcgaagatttcggggcgggacgatcagaatatgaaaatccccccagctcgtgtatcagttgttatacggtgcgcgcaatgggcgctgggtgatggtgttggccaacgcggatgatgatggtatctttttcagtggcattggatgcaatgaacgagggccactgcgcgtatcggtctgcacggaacactctcgtggtagtgacgacgaggggcgccctaacagagtgtccttctgcgtagcatcggctacgacatgaacctgcggcgaagcgtccagcggtacagactccgacaaccgttcttcccgttccgaccggatattcaacatttcatggtgttctgagttttgatcgatcgagcacgagagctatggctgctgttcgtactggactctgatatttcattcggtgcatcttgctggtcctgagtcaggtcaacttgactagccatggccatgaactctgctcttctagcaaacgatgatgctgtgcttcgggaaaccaattcgcgtaacaggacttgctctctgttcctgagcagccgtttggaccagtgcgtttatatcctgctccagagttgcctgtgacggaattgatagctcgcgggtttattggcgccgttgcgtgcggtcgtatggtttgaatttaacgctctctcgcagcgccacacttttggttcccaggatcctaggagtgcccgattttagccttctaggatttccaagtgcttcttcatcttctccgacgacgatgaagaaagctgccttgctgtctctgctgcttcattctcttgttcgcttacgtgctcttccatgttgaccatctttcaagattctccccaaactatgaaccggtggacgaaagcacgtctgggatacatggggtcgaactttgatcgattatgagaagtggcgagttgatcgatgtgccagatccatgcctgtagcttagaaagtgctaggtgtggcttctctcaattccgttatttcgtacagcccatagtcgatgactcccccattcaccactctacctctcgtttacttcacgtttcttggtacattcgagattaatgaatctgcctatgaaatcattctcttttcaaaacccccgatatttcatatagaccattgttgtagaaattgttgtagaacaagctagaacagctaacaagtaggatcaagttgaactatagtcaatcctttggttgcccgctgattgatgatttggactagctgcttcaccgatgtcacaccttagatactgaagacgtctccattcagctggtcccagatatagaacgccaggccacactgcacaatatacattgcgtctcccgactgccccgtgctgcacataattgatctaggattgttaagcccgtagtcttagccacgaggcttccggcgccggacgggtcaagccaaagggtttcaaacttagcccttcctctttatcggtccgccctttcggcatagctgtgtcctaaaacgttaattatgaacaagttgtcccatacagtggtacaaacatacagaggggccgttaaattgcaacgccaatcgttgtacacaaacttaactctggtgggataagggtaaaagggttttgggaataaataacggaagatgtgggttgtatatgcgattgagtaaaaagaccaagcattcgaagaagcgaatgaacgcattatcaacatatttgcttgcttccctcgagagtttcccactatgcgaataagttctgggagctttatcaaactcggttggtagatgaatgcaaactccggcttgatgtcggttatagattttgtggaatctggtcatggtaattgctttgtgctttcaagagctctggctgttagggtcgtcgactataaactactagtatcgttttagtattatattatctttgagtgttctcattgcagcgctttaggcgacgtacgaaggtgaatggtgtcgaaaagttggcatcaacgttaaacatcaatgttgaacaaaaagcaccattgaacaccagcatcacgtgagttttcggcgcatggaagatatccatatgagtcaacccttgtcaacggcaggagttggtcgaatctcccagtccaagttcgtttctaatcggccgcgttggttctccgaacagtgactcttttctcatggcttgcagacgcaccctacaccagctgataaacataagctcgataaagagacagaaaatagatgactacatcttgtctgggaactgctgggtaattgctcagtcaacagtaaagcgtagtttcctcgagtacagcgaggtgaggtatcgcagacaatccaaggcaaactacgtcggtatcaaggatattcccgtcactattcgtgcaaacttgaaaagcgttatgcacaactattacacatcttggaggtgttcgttgttcacagtactatgtagcgaatcacaggagaggaggatagcaagttccaagttccggtctctcccgagggctagagtcttgcccaggaccggtggggggttgcctgggttattaggaaaagcgcgtgatttggagtggagactgtcgtgtggccaatatattcaataactaccctgcttcgttcacctgtggttaaaagaaaattaatttatcatttgtctttccttccgaccgttccgtctgtcctcacgtttctgaccaccagttgttcaaatcaagacctgcaagtttgcttaccgttggcccttatgctttcaccactataaatcgacgaagacttgcaaactatatctctagtctagtttattctactgatatgtgtcgtagaaagcgtcgacgatattgtactttcggtcagctctcaaataaccgcatttcattgttcaccaacatcgtatctctctttccacatagtgttagtatagtttgcccgcatttcaatttgcactccagatattgagtacctataccaggttccgctttttatcccgcgcgtgagaccctcacatttctaggatcatattcgatcctagaacccatagcatagttcccagacacgcttattgtcgctcctaggggtcagaatcatagttcccagaaggcctacagcccccaggttaccgtccttgggtttctgtctctgatataacctgtaattctgtgctgaggatgcggccgccatgcaggtcggcgaacccgggaaaatcaatcaaaagctcgccataacgaagcctgtacgaccaattggaacgactgtgctataggtcgcattcatagcaaacatataagctgctcgtcatttagaggcgcttgcgggattcgcgaatttccacctgcagctgctttatttgagcccacagcagactattctcttgagttgtaacgtcaaaagacttcttcaattcctccgctctagtttccaaatctcgcgagtgcttctctttgcgctcccggcaagccctttgggcggcacggttttgagctctgcgcttctacattgtggtcagcaaaatccttgcttgatgcctatttctgtgagttcaatgggcgcggggtaaataccgtcatcgattctgaatccaatggcttcttatcacgtatcttcgccctgctttccccctgcttcttcttcgtccctttgttgtggattttgacagtcccatctgttgatttttgcttctcgtcgaactcgttattacctgcatccggcgtgctgtcagtagattgccgattagatcgaccgagcggcgaagctcgaaatccgccatagatttgtaatccaagagagagctcccatcatcgctacagtcaaaagtagttgcatgaagttgaatattgtctagactgcaccagtgaggggagcgggattctgggatgaggcatggccaggaagaataccttgttcgaaattggcctgatagaggccatccttggacttctgggatggcgtgctagatagagccgctaggagaaggtcttgttgacaaggtgaagggtgtattccctcctggtgaagctggtcgtaattgtccatggcaaacagtggtatttgaaggcgataatagtattaaacgtgaggataattgcctagaacgtcacagtcgaagcttgctcaactgaaagaaaagctgcaacatcgcaatgcacgtaggtaaaactttgccaaacacgaagttgatttccggatgaactttactgtcatgttctgcatgcggaagatacattccacttttcacattcaacggaaccaaaacaggtatgccttgaatcgggaaaatgaataacggctcttttacgagtacggatggtcggagacaaggttataaatctgggtggagaaaggaagaagtgatgacctcaagccgctgccttgttttgaatattttgctactctttccggcaatcaacaccatcaacaattacttgcattaacctaagttgtgttaattatacaaaagagctgggtcgctaaatccaacgtcagacatgctgatcggtggagcaatccattaataatccacgcttcaaggctaaaataatcatgaatgtcgaagatcgtagaggtatcttttcttctttttcttcctcccacacactaacattctcttcaaaaactttattccaattcacagtacgcagcgcaattccatgatgttccccaatcaaatcgtcctcgtctccggagcttctggctttgtcgccacacacgtcctggatgctttcctatctgctggctactctgttcaaggcatggttcgatctgtgaaggtggcagataaggtccttcgcacatgtccacagtacaaagttaaactcagcttcgcaatcgtttcagacattggcaagcccaatgctgttgacggatgtcgagaagcgcgccgacagtatcattcacacaacgagtccggcccagtcccaggtgaacgataatgagcgcgatttccatgcttgcaatcaatggcacgaataacattctcaattccgttcaaaagcacgcaccgggtgtgtagcgcgcgtggtcactttctccttggcctcgaatggtcgatttgtccaaggaaaaatggccctgtcacatgccctgtcacatatacactgaggtggactggaatcccatggcatatcaggagaggaaccgaagaagaatacatcgagtgcaacagacgaagaatacaccgagaatcccaaacaagtcttgaatcgccgttcagacaaagaacctccagacgaggaaacaaaagcacggttcgccatcggaatcgggtcattgatgtacctaatggtcgcaacgtgaccggatatcgtgtttgcactgggcacgttgagtcgcttcacgtctcagccacaatcgcaccaccaggtcgctctgcagaggttgcttcactatgtcaaatctacgcaatcccatcgcattacataccacagtggtcaattgattggatacacgggtgctgacttcggcgtctcggtcatcaccgatggagcctactcgacgtccggctacgtgttccaacttgcgggtgcgccggtttcctggtcatccaagagacagggggaagtagccacatctacaacccatgacgagtacattggacaatacaatgccattatagatctacagtggcttcgcacctttctggatggaacgcaactgtatcggtcccaggtcaccaacatcatggccgacaaccagtccgccattgcgctatctcgcaatgccgaatttcataaactgacgaaacactttgacgtgaaattccactatcagcgagccgtgctgaatgcaggcgagattgggcttcaatatgtttcgactgaggaacaggccgcagacggtctcaccaagccattgaggcctacagtctttgccaagttttgtggtcttctaggagtcggttcctcggaaactccaaggcaatatgcgtggcagcgcaggcgctctttccactttattttcccacgaaggttttttaagtggttttaccgaggcctgactgctctgcgcaattccagtatcgccctgccagcaaagcgatcctgagggggaaccggaatggaaacatctaccgaaggcggtcacctgcgaaaaatcgataacgctttaccagcggcctacaccaggaagctgtatgggaatttgcccagggccgaacgttgcacgggccataaatggttatccacttatgccaaggccttcggcttccactacaatggccagtgcgtgcttgcgcgcaataaacagtcacccacgtgctggtagactgcccaaatccaagggaaattcgacagaagtcagagagtgaagctgggggcgccttcaacagcgtatcgagtctgctgggaggctcaactgaaggtgagagaggtgaaacagacaccatctcgcggcctacagacggtcatggtcgtgctagacttcgctgaggcgtcacaacagttccaaagtcgcgtgccatgaggggagcctaacaatgtgggcggcaactaggccacgataggccttgacgaggctctaagttcgttttcatgaagtgggacgtcgtacatgtacatccacggatatatagttgctgtagcctgtacgatttgcgagagatcggagtaaatgaaatctactactaccactgtagaaatgtttcgtgacgtgacggtgcgatttgtaatgaatcattcacacggtgtccaggtaatcttggggcaggttttaatgacattcaaagtactagtggcaaatggtgttgccttcttgagcctagcactcatattgcaatttcctagtcttgccttcaataacggtgaaagaaatgcctcaataacctcatcttggaacattgaagcacggcaattttggataaatactggcacaatcttgcagatgcttttttaacgtcttcaatgcatacagtaggcagatatgtgtctcgaaatcattacaccccaaactaaactcgtgcaaatttcctgtcggtattgtcgtatgaatgcaggcttgtggagctcggagtggaatatcacggcgccgagaaacattagaatgacccaattagtaccagtccgtttatatgggccatatgagaaggagaaaagtagtatctcacttcgttcgtctcagggcacagacggggcggggaatgggaaaaggcaaagtaaagtgaagggaaaggaatgagtgaatagcgagctactaaatagttgggtgactatcagcgagttcccattgtttcattgaactgtttacattccatttctttattttagttttcattgttttcgcgtgtccaatcgccacttgccagcgcagactagccaatgcagcttttgatcaggtactaaccactagactgcgacatcgcccatggacgggggggcggtcgacagaattcgaaatattcaactaaagtattcccatatatatttacaatgataatcctggatttttaataagatatatataaatatatatagtataatttcctatatagctaattcatatatatttttttttcggctacgtctctactaagtaaccagttgcgcagatgatagcgagaaccactgtctcgttgataggcgttgaagcgatttaaacgacgttgaaagatgtttccgagactttgtggccgaagagtcaagcctcgacctggaatagttcctctcgaatttgtgcgttgagtgtggtgaaccactttcatcgaccgttgagagaaaagtaattccgcaaaaatatgattcgtacataccatcgaacttgcaattatatcgctcaacgcgcttgcatcctacgtctcaccgtttcaaccacggtttgatggaagcagtcaaaatgaaatgaccatttacgtttgggtttgttagggataggtgctgtagagaccgttttaggggaaacgatcgcagttgcagcatcctcttttcaggtggatatcgaagagagcagtaaggtgatgcgtacatttctaaatgtatgggtcgattgctttagagcattgcgattcttccagggctcaagcccggaacccgtagaaaaggtgtacgttggcaaaagtacgcccgaagcctcccgacgtttcatgaaacagcataactggtatagttatcttaggaccctttctcgagggatccattgggctaacatatcaattccgtggaggaaacggatcggctgaaagtttccgccagggttctggcaaattcatccacggaaggttctgcaaccatctgctgacctgcccactggctctgtagctacagaggtggttgcttccattgctacccctcttactaacgcaagctcctctgcgcttcctccaagcgtcacaaaggctgatagccccgacctgccccctctgaacgcggaaaagagagccgtcgaatccccaaccctcccacaaaagaaacgtcggcatccatgctccgcctctcgaacgccgagccgctcgcaacgggcgcatcgagagagcttcccaagccttagaagaattagttgggaaatggtggacgatacaatacaatacctgcaaacgctatctgaccgcgccttcgtttccggcaccattttccccagggggtgggccactatccatgtcgccctcagttgctacagagcaggtacgaagcgatcagcatgatcaaagggatggaaaaaaatgctgtctccgatttagattccccaccaacacagtcagaagagaagtgtcggaagtgtgctgctgcgaatgaggagcggctgtatgtctgagactgtactcgttcttctaatcctgctggctacattctgatagcataactggactttcaatattgaggggcatatatagcgttatatgaccaagaatcggcgtttgagaacctgtcaagcttcaaatctatcagtccatgactaagaaactttgcagtgcgaaggtgggttgaacgatatcctgtgtgacgacaagcaaaaaggtacttggaaataccggctgcgtcttggtctcaaccaacccaagagggattggagaatcagagagtacagacaaggcagggcgaggttgtcaatagtggattaatagcatttttgcaagtcgaattgcctcgaatatgtatcaaatcccaatgactctttagccttttcaacctgtttcctcgtagcgctgtaataggtctgtgctctactgcccacatacaaggatggaaacatttttaccgttctagttgtcaatccataactgctagtccttacaactcggccgtgtggacgtcgttctggcccaaatgccaccgtccaaattagaggaattaacggggaatcagttgtgctggccaaaccccgctgcatctggatgaaatcaaagaaacagcggtcacgttctcaaggaccagaggaatctgataggcattgtaaatcgccttgaatccctccggcccccacttctgattgtacgaatgatattacattaactaggtagccacaaatcgcattgtgggtaagctcaagtgctgcatggcctctcaatagccatgctatcgagcactccagtggtatcatttataattatctagatggctttggtttgatggcctgatgaacagtgggtgaaataagaacagattctgggcttggtcttccgtttggcaaaattgctgcttgtctaggtactccgcggtgaagggataacaaaacgcccaggaagattaaagtacattgtacactatccgagagttgaggtaattccttgcccaagccttagtaacgaagctgtcctgatgtgcgtggctccgatcgcccatgacagcatgcacgtcaacttcggagggccccgatggccgacttcacttcccttatgtgacgggcataagtcttagtcttcttgaagcatttccagtgaaataatctgaggaaaggataatttataagtatctcataaaagagcattttgacagctcgtgaaaagatgccataccgattccgttattatggcgacatctgctttttgtgtctttaagctggcgtggccaccagtcgacagaccttgggaccaatgcatgcatggatatatcaaaggctgcgcgagtggataaagaatttcaaatagactttcgggcaaataggtctggcgcagaacatagatccagacagcagaggccagggcagccactcatacacactcgacctagcatgcgagctttggctgcgatattagccggaggaatacacaaatatatatgactcgacctttggtcgtttgccttaaatagacgaccaatccacgctggtggaagtatcaaaacgagtgaataaataaatggtacattccacggcaggtactaagacatcgcgaataagggaacaaatgttttctgcctatctttaaatcagtatatttataggagcggcataataccatgtcaaggaggaacctatagtggaaacgctcaacaagttatgatagacataaagaacccggaggaaacttgcgaatgtccgatgtgtaggtcttaggtagattacagacggaagaaaatagagagtcgtgacggacattaaacgcacatttcagagatctataagaagtcccttggcctactccaagatgtcccagtcactcctcgcccaagccccattgatttgagtcccaggagcatggaaatttgtacaaatagtctagatggtatgaatccatcattgactggccaggggccatccactggggttggaaagccgcttggtcatatgccgccgggatatagtttgtgtttcggttctggtcgtagcattgtggcaaaatccgcacatattgttgttgttgttgttgttgttgtaacggtggatggacatgggcatgttgcgtgtttggcgtgtgtagcacgtgtgtgggatacgtcatcggcaccagtacattttgagaaacggtcgcaggcgctgcctcgtggactggtacggaaaccattcggacaagctgtggcgagtaaaattcatgatgcggtggcattgattgcgaataacacgattgtttggcaggtatatactgctcatttggtgtaggaactgatgccagcgtctggtggtatgagtgctctgaggtcgcatcttccgagaatggtcggttcaggagtcccggagggtgagagcggtgtttgtgtttggcgaggatagtcttgcgacagaagctacattttcaaaagatcatcagacgatttccgaccatctcgcttcctcgttatttaccttcgtccacatgtgggctcatggcatatatagggccgctggccagtgtgaattcgacggtggcgggccagactcgatgactagagaagaattagaaaccgcggcttactattttaaggttacttacgtctgagaacgccttctggcattcttcctgatcacagacgtgtggcttttcgccagtgtggatcctggaatgtacggtcaaggcacttcgttgaataaagctcttgttacaatttatgaccatgcaatgataaggccgctcattggtgtgtatgcgataatggcggcagagatcagacttgcgtttgaaagactgccgatttagggcttgtgatcaacaccaaagagttagaagctcacttaccttcccacaatgatcccacgagcagtgaaaatcgcgcctactgccgggagccattttgcggtcaagtaggtatgcaactggaactgccgtacttggaactgaatcgaagagataataaagaaagtaaaaggggggaaagggcgtgattgcacaaacaataattacatgcaataagatgcggtaagtctgggatgagaatgcattcagccagggtgcctccaaaatatgacaggagagggagccgaggtgatatacggttaaggctaagcaaaaaaagcggtcctctagcaatcgctgagaaaggaaaaaacaatggtggggatgatagttacttgttttttagtttacgggtaactaactaactaactagttagttatgctagcgttggtcgtgttactggaactgtatgttgataggcaaagagaaaatgagaccccatattacaggaattacgccgtataccaccttctaaccgaccttaccaattgtgtcatattgtaccacataatcatataccgatataccgaactccccactccacgggctgataggatatacagtggcgagcaagacaagggatagaacaacacccattgttccgaacaaacagcatcttgctccaaattctctttacccagcgaaatcatcgaggagatgacacgaattacggtgccaacgaaaattggcagaatgaaaacctaaggatctggtaactgagaatggacattcagcaattgcagcttgtctaaagaaacgccttttttctcaagtatcatattcggtggcgatttcgacttgtattagtccacaaggctaggctcaacttgagtgcaagtcgtctcatgttctctggacggaaattgaggcgttgtttactgtcttaaactgagggaatcttaaccgcttggctgttttaaactcgggggttcgaaatagtgcctgatgaatcccagaagtcttcctgagagcatgcagagaggttactaggaccatagaagtttgctatttatggttcaacaagttgtttgacctaaggtttcccttcttttttttttttttttttttttttggtggatatgacacgttggtattttccggctaaagtcgtgagaagacacatccaatctgaccatgggacttcgcaagcgatcgacgcagactcctcgccgagttggaagatgaaagtcgatttctaatcagcttgcatcttcgtataggcaatgtaggaattaactccgatgtgcggcttgatacctggtctgtaccggcctcgtatcacaacagacagcactcacgaatataccaatagtccgatatgtagctatcgacgttctacctggcatcgtttctcgatacctcgaagggcctatcctgcggtaaagccgattaggtaaaagtaccgttgagggaacagatcgttggccttggaaggctgataagagtaaggcaagtatagccctaggccctcgtaacctaactgtgaccagtttgtagtgcgtaacagcagataaccgctacacagaagccgcctccgccccccacccccacgcccggcgaacaaggccttcgccacctttgcagccacggactagagcattacaaacatgtgggcatgtgggttatgtaaaaaatcagtgtcgtaggatgtccagatggatataggttttggcttaattcaatttgatggcgctttgattgagataaaatgcatataatctcaattgcgatgagttgggctgggtggacacctcacttatcggatatgttacactacgcctgtcagaaataagacatactaataacatctcaaagtgcttaacgagggtcaaacacccggaagacttgaagctgttccggtaattggctgcacaggaatttgagtagtttgttgtcctgtaaaagcgggtagtcctattggtggggataaattgccgatagccccgcaacgtcggagtgcacttttgttgaagaaccgggacaacaggccgtatataagggaaagtctatgcaaaccgcactcgggacccagatgcagagttggaatgcaatactacgcatattactgttacagtattgttcaatgagagtggtttgaagtatattctgaattgtatccactaacaatacaccagcttcttactcgttgatgcctaagacgggacggccttgttatctgtacaggtcgaaggatgtggagtcttgctctctgacttcctccttctacaatggcatatgaatcgattgccctgtgagcaaaacaaatgctgtctctcaaagtgccaatttcaccttgaatgcaactaagacagggaacctcaacacccactagagcggaactatctccgctgctcatcacacctccttttttgatatttccacagcactctctaacttcataaaagccaatcgcgctggcagatctcttgaggaaatcacagagataaaccaagtgttgtaagtcttcttttgaactggaagtaattaagtttattgaattagcgacaatcacaatcgaaagtttggtttcttgcatttcgtgctaattatgcgacatctcaaagacttgcttgagcttggccttaagttcgtcgtctaccatgatctttgtcgaacctacttggtggcaatgtacatacgacagcagttacagtacttgcctcgtaattcctccgcattatggttgctagggcgtgtacttcgcaaaatacctggcagtgtgttcactaagaacgcaggcggtggcctgataaggacccttgcaataaaggcaagggcaaatctacaaaagatggttgagagccaaggagaatttcggcaaaaggggtttgcacggtgccggtaattaattacggtgttttatgacgactcacggaagatacaatggtgtttatttgtatttttttgggcccactatttccccctcaatcaggtaggcaatgacggatagtaatgactccctcgcggataggaagtatgactgtgctacgctgtctccgcatggtcctggtgctattgtgggcgatacgctgggccatggagagggcgctatcttgaaatagactgcccagaagattggttcaatataactccttccgctgtactctcatcggatcactgtacaatatatatgacttataactgcgccgcagcttccattgagctgatgtttcttacagttcgactgatctgacccgcctctcttactggacgccttttgccgaatggatcaattgtcgaaccgattaattgtgctatttcaagatcaggctataaatggcctatgaatgacctcgaaggtatgcccgcaacaaaatagttacatcatccgcgccacagtccggtcatcagctaccaaacttgctcgcactgtcttgtttcgccctcagattatcgcgaaggttgtatgtttgagattactgcaaaattccatcatctagcagtgtgttgattaaaggcatctaattgattaatatagtgctttgtgacatgctgcgagtggcctcttgttgaattgtgcagcactcaaccagcgcgcttggcacggcgcccatcttcggtcccacttcgtgctggggccacagagaagtcataggcgtctcttgacgccactcaccccgcatttttagtgtacagtcatgttgcatgagtatttgaacctcagtacttcaggccccactctttttctgccggttaaaatttctcatattttctaactagctataactacctagataatataccaaccttcatattgataacttcttccacccggggtggcatgatctcggttcttctttaaaaaaaggggggaagggggttagtataatactagtatactacgcgtgcggtgttcatactagtgagaataggtaggcggtataaaaagcggtcaatggtaaaggtaccaaggtgcaaatactcatgcaacaccactgtatgtgttcattttcgtgaccataacaattaacgcgtccaatctgggatatatctccaacaagcctgcttcccaacgacaaaagatccattcggtcaggaaataaccacccgcatggcattaattccgggaatacaggtagaaatgagcaggcgatatgggcaagcaggtttgggaaaggtaagtttcgtccttctaacccctgacagggctccggccagttattggtggtcacttctgcggtcccacaaccaggcagatcaaattttcgagcgcttctacgaacatattgcaatctcggaaaggtggaaagggagcgccgtttgcaaatcagggttcagccccaccgaaaaacaggactttcgttggaaaggaaagcacgggggcagatttcgatatccccgataagcgaaaccggagactgacccgggattattaagacccctggagactgtttctgagacatcacttgctgcaacggttacatagactctagtggactcccaaggttgtgtgaccttgctcatcttgtagcatgtgtatattcgttgtattatggtggggttctgtggatcatgcccgagtatcattaatacaggtctaaccctagtaatgcatgagtgtagtgcgtaccgaggtgacagaatattacctttagtacaggggatacaacggctcattattgtactacatagtacagattaatggattgaacacggcggggaatcccagccaacaagctgattcggacacgcaatataactaggatgtgaagtctggttgaagatagacaactgctgttccagatgttttgatataactcgcttggacctttttaattttttcaaggtcaggacacaacaaccgtagtccattaatattacgctaaaccctgaacggtgttgtgtttggatttacatatcactcgttgtcattatcccgattggtcagaagcacgtgcgaacaaatgcattgaatgaaatttgggtatgtcctggcgtggctttaaatcatattccgggggttctgggtccggggatcaatcccaccaagcaggccgaaatggggtaatatgtctgacacgtccaaatagaataaccaaatgactggtttgttgttagattggtcggaaagcgcccaatatgggcacggaggcttagctcgcaaacaacgaagttgaggcggtcggtttctcgagccacctctccctgcctccggcgtcgcggtaatggcactggaataatcaccctaaccccccatcccgcggagccgctaatactgagtcagggtttacctccggacggaatatggttactcgggacgtgatggcaaaagtgcctaactgctttgtccactagttattttaagacgtgtcctatgtcttagatactagactgataccgggaaaaaataagttgtacgagggcatgttttatcaggacggttgatcttgattttgctgcaaagcgtaatttcttggagagattattccggagcaacttctgtcaacagatcagtgtgcatcacagactaaaggcaatgaataccggcagcctacgaattgactttcatgcagctgctgccggcagcggggaaggcttaagtgtatacagtactgtcgaatgcgaaaacggtttaccccaagactttgttactggcttgtaatcaataatagcttaagcctgattcgcctaggccgtaggtgtggtaggtctagaagtggttaaataagttatcgcttgtcctaagaggatgggactttgtttcggattctggccgaggaccaaaatgtgtgccgaagggataaactgttttcgaattctgcacggacttgtagatagactttggttgcccaccttcatgcgagcactcgtgccaaataaaccacaattgaacattactgccaccgcccgtcgatatctaactcatgaattcctcaaactcatatgatgaagaacctatcacgccgctgactttaccgggggcgttggtggactgccaccgccaggagacaattctgcttagcgctgaaaagttaagggtatcttcggtgccgggcgtgtacattgcggcgagatttccagaaggtgggcgatacaaacaatactttgattatggacttgaattaacactttcacagatgccgtcgtcatcgtgaaagaactcgaagagaataaatatatcatttcgccgaattcgcccgccctccttttcgaatgtcaaaccttgtacaacactagagggcttgacttttcactcgcccaagtgtatgtggctatgatgaaaatgtccagaaaacacacgctcgaaggccaaataggagattggctccgcttcatgatgaggaagtgcctctgtagcaccgaattgaatcggggtgatgaaggtccgtttattcgggtcgcgcttgcactacaacgaagggttaaggtaagattgcacaagaaccaaatctacgattttagcagatatgatatctcgatcagtgaggttgtcttggagactttcctccctcgacatgcgcgtcctgaatcttcatgctcagctgaactttggttcgttgagttttctctatctgatttttcttcctcggtgtcaaaagaggcgactatttctgagcttgcctcctcctttagttacatttgaaattaggtatattgttgtagtctaatcacgggaagatgatcgatgtctaatcccatgtccatttcccctccattacatatgtgtagttagccagccgttgcgttgaactatttacagcgtcgccctgaagctgtacgtctgactactgaactgtaacgcccatgccggatctcgtattgccaaacttagtaaggccgtccgaaaagcacaaaccgctgtgagcatgatatgtagatagaaagtaaaaggcctcggcagatcccgacagtcaagatcctcttgtgaaattgaaatgagcgctaatccttgcccaagggaacgtacccggagtcccagggaattgagtttggcacatcgccgccatactgcaaacggcagaatggtttggccgaacgcacgaatcacactatccggaagcggatgaacacgctcctgtcggatgcgatactatgcccttcatggtggatagagcttgtagacgcagtggtcaacttgaagctgcgcgctcaaccatcgatcttacagaagaagacaccgtttgaaatacttatacggaaagccgccctcgctgtcgcacccgcaacacattggctcccgtgcctgggtattgatctcgaaagagcatcgagcgaaactcggacccaggtcatccgagtgccgattgctagggtactgtgaaccgaactagtacaagctctatgaaaaccattcagggaagacagtcttttcacgtcatgtcgagttcgatgagaggaccccagtggcgccactcatcgaagagaacaggcaacgacctcccggacaacgttcctccatcagctgtccttcgatcaatgccaagttcaaccagcggactgccagaccacctgcatcgccattacctccgctgaatgagcgagagaaaaggccatctgagcgtgaaaggaagaagagtatataaatcagagaatagttgaagtcattgaaattcctcgggctatggaactgactatctaatgtgtcaggctgtaaaagttgaataacgaccagtgcggacactaccaagcgcatgtttaataaatatctttgatcgaaccacaatgcatctcactaaatcaagaagtgcattactatctatccctaaacaccatataagataaatactataggcctgctcacatcaagctaaaacgttgccgtttaggggaacatgctctgagatatgatagatcattaacatatgaattttttacatgcctcactcataccatctctaccataccatgcctcctctataccgtgagcctcttcaaggccttggtgaaacccgtatcggtaaaatccgaattcgatacctcctttcccgtcaaaggtgttcgtcaccattacgcggatccgaaagccacgcaatctgctcctgtaaccatatctccgctctatccatctgctcatgcaagcaagcagcattaaaccccagtgcacttcttctggcctgttccatgcgttccaattacagtagacacttgtatatgcaactgtatacaacagtcatcataaaagcgtggagaatatcctcttgtatactggcaattttgcgtataccaatcgataggatgcctagctgagcaatcccgtacatagagtccatgtttacggcccacctcattacgcactgcattatcattctcattgtcctgcaagtcaatttcatctattcaacgatatataaacgaactaaattagtatttgcagcatggcaacccctggggcttcatgtttgccttttcttgtccgatctaacaacgtctatggggcttgggacgagttcgccgcatccaatccaatcgaattgcctctcgctccgaaatcgctcccttccggcgcggggtttctttggcacccttccttcggtgtctgccaggctgtccttctaggaacgtaacgtgcgagccatgaaatcgacgatgaatcctcatttcaaggaccttcttagctcgctgcaatggtgggctcaatgagtcagtgcgaatgttacgaccggcatggcgagtgatcatctttgatggcagaaggtttgaggagccacacagtagtggcatcagatcgtagtcgctggctagtctttggcggcggggccggcgagctgttggagtcgttgcaattttaacagataggtggcacaaaagacatggagtcgacccaaccctgcccattatatatatgctttgctggatctttggggatgttgttagcgagcccgacagtctgctcagtggcatcagttttcgaccctccagtaagtcactatcggttccgccggcaccttagaaggcagaaatctttggcagcgtgaaaaggctccaaccaaattacttccagcgtttgccgacctaagcttaatgattgaggatgtatttgaacagaaattgaggttactttttcctgtgttttcttcagtagcccggtttacttgatgaggtctcaataaaaagttatacccgacttccaaccaaatctcaactaatccaagttttcagctgaaactttatttacccaatttgaatggatactggtgggccccacccacggataccactttcgacttgagaaagaacgaatcgtcggtcctacattgagcgggtgttttggcggaagggtcagttccgaatcatattttaaatacccgcgtccccatgcccttgatattctttgagtgctgaaggtaccctacgatgcctaaacgtatgaacgagaagcgcttcaaactgaaacaataatgtcgagaagccctagcggccaatatatgtatttgtggccctcttctgacaataacctcagctaatattcctagatgtccgacttcgcatagtagtcgatcctgaaaaagtccgtcttcaaccgcgacctgaagatggatacgcttggtccgtcacgggtccaaacgctggtttgctcaaatctagcttaagtagcggcatgcatctttaccggtcaatttacaatgagatcggccatccattcgaagctgtttcctcacaaacgttgcgaacctcgcagtcaaatgcgaactgtattcccgaggtgagaaatgctggacatccttattgatatagcattgctgacagaaccttgaggcggagagttttggagacggaatgggtggttctttcacggcagagatctccaagcttaaggctgctaatagcagcatagaaatcgagttggaacgcactcgtgcgcgactgaatgactgtcttgacgaaagtcacacggtccgggctgaggccaatgaactccgccacgatattgaaattcttcagttgcacaataagaaactgcatcataagttaacagaggcgaaagcgggcattgctggagcatggcggatattaaactcattgcaaacggagggaattgagatcgcacttggcacccgcgatatccaatcatcagcgaatggcattcacggggtagcgagcgaggtcttggattgacgagagcacgcgacagagatcccatatgcgctaacagcctactgagtaccctagttgtcatgcgtcaaaggcaacagtgaatgtatccctccaataatacgccttacaatttggcatcaactccgtctagattcaaatcgacaccggccccgagatgtatagtatccatagactgaacgtgggctaccgggtaagtgagccataggagtctcgagttgggtgtttgatagcagaatcctcaactggtgaagcccgaggcccatgccgtagcttaaactgacaattacaccatgctcaggtacctgctatgactcccgcttgattggttgcactggaggtttctatcactcaagcatgcctatgttatggtggacgctggatggatgccctcattactgagtcttgggcgcaaaaatgcctttcccccgtaacaggggcccaagtattaatgatgctggtcaaccaaaattcagatctaaacacaagtaatggcttgttgaggaatctaggacaggaaactgagaattgtttattcgtaaaaacaaagccgctattttcttaggcccgacccaatggagagtcatggaagtcgacaaaattcacaaagcatttgaatgatagcattttagtcttaacactaaactttgggcggaatttgaccgattggtgctttctatcatgagacagtgtcgtatgtaacaacgtacatatttgtgcggacctgtggctcgcaccctccataatcgagcggtaggtgttttgtgcgttcgcactaatgcccagttctcggttttcttaggattatgacccttgtttggcatacctcctgagcaggagcaagagcggtttcattcgggttcaagtcctgcgcttgcgtctcctcgtactatataattcagcttctcgaaacacacttcttgtattactttcaacctcctacgtctcgttgcgctatcgtttatcccgcgatcgaacacacctagcatggcaaagataacaaggctttctgggaacaggcagcccactgtagcgaagtacagctgcgtcctgcgccttcctgttatccccttcggtctactcggtctagatctaaagacgatcggaaccctctcaaaccggcgactgggttgcacaagcatacggtacccaatccctaccttccacaatattttctggatttgccttggccaacattgccctggtgacataccttgacgtactcccaactgactgtgctaggcatcctccatcacgagaacgaaaccctaggcgggaacatgataaaatgtcccataggaaatgtcttcagatgatgagcatcgttgaggaagagatccaaaaagcacaggaggagcgtgaagaggagagacacaagctttgccagttgctggaacaacttcaagccgagaaagccgacgaaacctcgaaattgcagctggctattgcagcaagggatgcagcattggctgacggtcaacgggtcaggcaggagatctgtgagttgcagcagcagctagagtccacgaatgccgctctgcaggatcaggtgccgtggaatgatattcagctgggtctggatcaggcacgcggggacatggtatcgacgaccactcgattttggaacacgatcgatgccctccagaacagacgactggcatcctatttgccaggctccggagtgatccacgcggactgcgccgagcaaagcggcccggttactcagggccatgatgccctcctcagcctctctgaatcgaatgtcccgcttcctagtcagcaggaaccgtctacgagcaactaatatgcatctcttgtctgaaaagaatacctgcgttgaacttgctgggtcttaatttcctgtggatagaattgcctttaatggagtcaacgcgaagatagctcatgaacaagctccctgcaacattatcaccaaaccattctaagggtagtggttaagaagtatgtgtattgctaatttcttgctcggaagaatatcgctgggcgccttggtccaaggaccaccagtacgagtaagcacaggcgtctcgatacagtgttcggcgcaggttaacggcgggttaaccgctctctaggccgacaaactccagactccttggttgttttttatacattgagaaatgtaatgagtaggtgggactgatacttgtggagacgcagtcgtggtggattcagtatcacaccgcttagatacgcttcagaaatgggaaagaccttggcacgctggtctgtgaagttgatatcttttgtagtccatgtaaagggaatgcatcttgatagtccgatcaggacaatgctaggccttgtggctatgggtctaatggagaaaccccagcttctcttgcgcactacagttgttatctcttctcgttcctcagtccaaagcttgccgtagtatgtcctgatctaactcaatcacaaatagtgctcaactactaggcacattgaactactctactagtatcaatcgcgaaggatcgcaccttaatagtcgcaaccaatatgtaatcatctttacatggcgtataattcttatgtactactgtggctttagcctttggggcatgtctccagttgtacaaattgtgcacaatcatactggactagacagtacaaatcatctgcaatggtggaactaatgaaaggcttaaagtacacttttacatatagtggctcgcgactagcccctcggctcgggcgaggtagctttggtgtgcacaacctaggcaagcattgataaaattcgaagacccaaatacaacgacaaactatacatggctcgcctggtaccagctcgcatgggtcaatcagaccttttccagtgtccgtccaactcagcgtccatgatgagggtgtccatattcagtaatattttcagtcggtgaaacaatcgtattcacaactcaagaccaacacgaattataaccttcctctggtgtatatggtcggatatcaaaacacagtttgggtcgcatcactgctgccgccgacgcatggattgcccagtcttctggccctctgtagatttgtttgtaccctgtccggtcaccttctgtacctcagcctcgacgattgccaatcggcccaagatgccaaccagatcgttgcgaacggcttcattccaggcgccttggtcatgcgacaagcgctcaacagacctgcggagacggttagtgctttacattctcactcagtatcgaccgcaactcacctcattcggttatctagtctggatattgttagcaggccaattctgaattatgtccgtgtgggattatacttactctgtcaggcgttcaagagcaaccgtattgctgtctccggatagctgagtttgcccacgtatttccaagtccgtttcatgtccaaacacagttctccgctgtcgtgtagcttcttgctcactctcatcagctgcgccactattttcctggtcgccggagtcgttttcctcctgagaaggtgactcgtcccttgttgtatcccctgtagcgatgctggacacactgccggtgtcctcagactctaaggacgacaaagacaatgcacgttgcaatctgctccgaaagtctggtcgtcgaagagggcgcgaggcttttcgaattccgcccatgtccgcgtctgagttacgctgaggtgacgagtgttcccactgctggttgagtgtgatagaagaaagcactccggctttatagcaagttgtatcgcgggactagaattaagtgttgtgcttgctaacgataacgggaattgcaagcgcacgcatttttcacccatgcattctgattctgcacgcagatatctattctatttctgcatggctcactaagagtcggacatgtttcaacgaactggtgaaaccatgtcatattgtcaacaggtgcacggtggccgttcaacgttgttgattctcaacgaaacacaatacatcaaaagttgaaggcttttagccttcagaagcttgagctggggcgagtcgtgagagtctggtaccagttcaccaagccgagtcatggctcataaacgcaatcgccatatttatgtgcaacactatgatcttttaaactcaacaacccttcctcttcgagttcactttctgctgttttattcaaccgttcttcccacttttgtgacttaccccagcatcaccatgtcaccacgtagcgcatgcggctggcccgaatgggaagagaaaacccttctctcttggctgaattcccatcgggggctgtcgtggaaagccctctccgacgcatattatgaagaatatcaggtggatcgaagcgttgagtctttacgagggaaaaagtaccatattctgcggaagcagcgtcgcactggcgccaaagtccccggtcgttcaggaaaacaaaagcgcccaggcgacatgcggcgctcgctggtcgatagcgattcacgatcacccctgccagacaataactctgcccaaaggaacattgataaatggtttcaaacaattctagcggccgaccctagccagtctggggacagcgataaaccagctcaaacagcacggtcgaaaatacgtatgaaatacttttattcttcctatataagaggctgaccttttgccacaggctgcgtgacgccagcgccgcttccgtactagcctcaaagaacacgatcgtcgtcctggatgtgggaatatgtacatcttgtctgtgccgccaggaaactgagatacccgcggacagaacgtccacactagcagcatgtcatcgactggagtgctacattgctatgtcgaaggaacagtggccaactatttcgatgagatagtcctggtgtatgtcgttaccataaaggctgtgcttactcgacaatgaacactcagcatgagagatatgaatcactccatggatttcgtataggaaggagcaatcacccttgttaggaattacaacagtagtgagaaagtcccaaagacaaaggtgaacattcgagcatgatcgtggtgcctctgagcaggcccagctacacagtttcgtccttgtcattctaaaccaggggcatggcccatgtggcctgcaaaaagctgcggacagtgtataaggattcacggtactatgcgcgttcccatatagagataggacagggtagcaacactaagaatatatgggttcttgttagcccaaggaaacatgtccgattggatttaattggatcggtggtcgagagcggagtgatctttggaatgaagcatccgatctgctttcgacccacgcccaaagtcccaaggaaattaagtttgacacagactgcggaaccacgagcgggactgccgatcagtagcggcaccgcaaatcaattcgagagcttgtttgggtgaaccatagaaatgctcgctcggtgagagaatgcggttttagtgaagaattcaagcctgggttcctgcctactttctttctgggctgctcgtaattaagccttgcagcccgaaagaaaagagaactagagcagaatcaccacaatctccgtcggctggtatgtaggataaatttactgcggtaaggccaatattttattagagagtttctctatattcagcatcacgatcaagatgtgcagattgattgaaataaagtttagggccgcaggagggccggtccacattgaaatcttgtccggaggccaatcggttttagtgaaacggaggcattttattcaagctcatgtggtttgtccataattagcatagttctttgcaagccgtgtgctagagttattgaaatagcggtagacttggagagatggagagggagtgttgttatggcccaaagagagcaataatcatcggcttattgcaggagaagatacatagcttctagaactttcttcagaccagataggcagagttcagcttgccacttgacagggggacttaccttctcatgactgcggccaagaacacaaccacggatcgggttgtagcctaccattgtgtcgccaaagtctgcgtgttattccaaatactcacctgccccagcagtacctcctaggcaacaatcccccgttccatcggaccctgacagcggccaactttgggcttgtggatcgtgtctggacctttgcaattgtttccattttctctgcataaattgaacctccctgatatactgtcccgtgggtcgtcgctgagatctgcatcgcagaaccctacctgcgtctgtctaaattcacgcgtggtgtttgattggcccgtcgggtgccattcgtctccagggtctcatcagtgtgatagtggcgttgcaatcttgcgaggggtggcgatcaagagaacctaggtcgtgggccttggttgcatcagttcacctggttgtcctggaaactagacccagtttcttgtctgagcttttcaaaaggtctggaccctttttggctatcatgccaaagaaagacaatcttcatcctgaaattgaagtatgccagggcctatgcgcccagggagtagagattttagtaaagacaacataagtgagctgcgagtagaaaggaaagaaattacattcagcggcgccagcctagagatggacaggattggttctagtgagaccaaaaggtcctccggccaaccgcaggtacagcacagcgtttccaccggccatctccagcccattatttcggcatctgtcgaagcacttcaaccctcatgaaagaaacggtgaccgtggctaaaacggggagacgtagaatgcaagcgcgttgagcgattcccttgcaaattcgatgatatgtacgaatcatagttttgcagcattactctcttctcaacatccgatgaaagtggttcaccccactcaacacacaagtttgagagaaattattccaggtcgaggcttgactctgtaggccacaaagtctccttcaacatcgttcaaatcgcttcaacgcttattaacgggacagtgattctcgctacatctgcgcaactggttcctttagagacgtagccaaaaaaatataaaaggagccggattcccagcccaaaagaattcaggacttcgaccctcacactccggtgtgtcatggtgtccctctcttgcctgcgggcttgagagtctccgtgaccacggctgtcgctgccacggagcccagcgatgtaagacttgcgctccctcacagtcaatgagccctgtgtatgtaaaaatgtgcttcgcaggataggtctgcgtgaacaacaatccccgcaggataggtctgcgttatcaatgtgcctcgcaggataggtctgcgtcaacaataatcctcgcagggggggtgctgcgaaaccaaggacttcagagcttccgtgactacggctgttgctgccacgagcccagcgatgtaagacttgcgctccctcacagccaatgagccctgtgactgcaagaatgtgctcagtcatggcaagacttggctcgccaagaacttgtcatcgctccccagcgatgtgcaggcacctctccgtggtgctggggactagtattcgagtagcgcaagggcattctaagaagcaaagacctgtacaacatcttcatcgtcttcgtatttcgaagtatcatctttggagagatagagcgagcgctagatagatgcctatcaatcaccagaatcgtaaattcacgactgaatcttcttcgctatcgagcgccgtattctccaccctcctgccttgatagtttgcggtatgctagttcatccgccgcaataaaatccatctgcgatcagagcgcaaagcgaatagagacttgagtgtttgggtgcgtcgcggatgtgttgatgagcgttgattaacgttgaagaacgtcgatgatcgttgatgaacattgtgaatgttgatgatcgttgatggtcgttaatgaacgttgatgaacattaatcgttgacgagggtgttgatgtggtacacggccgggcggtgaagttgagtggtcaacgtcttacggccttcgcgcgagctctttcttgccatctcacccacatgacagagatatcagttgcattgttgtttcaattctgcgttatttcttgttccctggtggtcactcggtgaagttcgcatacagtctccaatttgattgacctggtgaatgcaaacaccggatttccttcggttcagctaaaacaggcaatgcactcaaggtcaggcctaccaggtgtagaagcatttgatgagaagcagtcgaaatacaatttgttgtctcaactcagcgatagactgttccttgcgtaatcaaagttattgcttcaatcggcgattgaagtcactcaaacctattctactgtagaatgcctacatccagaacggtcgcgatagtcaaggcagcaggattttaagaaaaaatttcaaggtagtactatcagttatacaagtaatatctgtatactaccggtaatatcggattttagccgatgttatcggccgttagttatcggtagacgaatttgtgagccgatacgataaccgataatttttttgaagctatttgtagtagccgatgcgatacccggtatggagaaattctgccggtttcgtatcgggaacaactactactactgtacatcaaccagaactgcccccgtcaagcagttaggacgatggttctctccattctcggggtgtccggtgtcagtaccctcttattctgtggaggagaagccaaaagaatccgcgtgggatgaataggggtcgagccgcacagttttccttggttgacgacacccatccaccccacgcaaatcagaggaaaacgggttatgaaaaccatccgacgactgcctactcgactcgtactcgagaccgaagctggacttgttctccagcggttgtggtatcgcctaggcaggagacaggacaacctctgggttcgaacacgctctgagatcgcgagacgctctacgaacttgaacgaggaagataccgaagacataacgcgaaatatgagacaaacgaatggaaacacatgagatggcgttgagcggggaggggaaatacaactggtggcgcagcaggttgagcaagtcgttcgggagctccacggaaatggcctgggtcgggacctcgttaaagcgaagctacgggcaactttgaccaggacatcccgtggcctttcccaagcagggtgcactgtctggcgaggaccctcgacgaactcgttaaggcatagccacgggtgctcgagagggctgcaaatccagggacacaaactaggttagtgaagggcagctggggtatcctgctaggccaataggatactcttagcaacctttgcgagacacggtcggctggcagagagagatctcggctggtaacgcgaagtagggagaattctccctgtggggcgtggcacataatggcagtaacggacgagtcgagaggacccgacgagactgtctatgtggcccgagaggacggacgtgcgtgtcggtgtgcaaatgacagaaacagctacctcactcgcactgaggacctgaaatctaccggccaaagtggtgtcgtcctagtggggcaagtccgacctgtccttactatctcactcgcactgggaacctgcggctggtcgatggatatgatgtcgttctaggtgaaacgctgatgatgcatgcttaaggagcaaacctggagacacctgggttgagaggtttttgccggggcctcaatatctggagcgcgcccattgaaagatgcgcgtgctgaaaaccagggcagtggcctgaacgagcgggcctggtgaagctgctttgcgtcagttaaaacagtgatacagtctttctcgaaatcgccttgaccgatgaacacttaataactcttttctggccccactgccaaagccttagcgcagattacgccaccgcaggttgacactagttcgcccgatgggattgctatcgagactcaaaagacagacgcgcaagccagtgcttcaaaatgccgtgctggaagatgaaactgtaagtaatgcactgcggtgctgttgctgcgcgcgttggcgtttgccatgtgtgtggcgtgctctcaatatggtgtggtcttttcccgcatcctgctgacagcacctgggcctccacgagcatcaagctcggggaggcatgatggctcgtggaggccgttgctatcagaagcgggagtgcttggttcccatctcactaaatgtgtgaagtggcaagattattgctcgcacctttgtagatcaaccaactccattgtgattcccccaaatcggttatgctgagtgaaagtagctttgcctcaaggacaactatgttgtttagggtacattatttacagtaggtaatatagatatagctataagatagcaggctacaaatttactagtaaatgctaggatcatcttccagcagtttagagcgctaactacacattcagggataggtggctagtagatgtgggtcgcaaatcatgagtatgtctaccaactgagtcacttctgtgaccctttcgatttaattatccggcgctaatgtgtttctaaccttcttttacaagcgctagggccacctcgctactaatctggtctcaacctgcacagtcgagggtcttgttcatttaccatgacaatcggaaagcgatatgtaaacaaactacctatcaaagccaactcaacaatattatcataggactgccggcagagtgcataaagcatctttccataccaccccggaaatcagttaagggttgctagttactaaaagctgaaatggtaagagatatcacgcccctccttcggctgcgccaatgcttccgttgtagagagcccaggcgacacgaagccttgctgcagaaagctgcaatatccgccatgatgccctactggataaggttggagatgctcagtggccgaaggagaaaagtcgtgcgtgaatacagctggccgtgtagcatcgacatgagagatctcttcgctttcacgtttcctcttcaaaccctgcggcggcattgatatcggcgcagtcatgtcaaagccacgtgtggtcttgtgatccagtccagcgcagcatatcccatggaaagggccctgtacgtcatatttattgtgcagaggcaagtcccggaaattcgctacaggcgcagataatgccggcggagcatttttagtatagcccgccttgatacatgcagacgtagtgttcgaactatttggggatgccgtaccaaaggggatatcgtctccattttcatcgtggttgaatgtggcccccgttgcttcgggccggttcatacgacaaatccagaccgggcgttgcccatctgcaaatagtagtgagatggctgctaacccgataaccttggaagagactcatggtagcataccacttttcccatccagaaaatcttcctcttcctgccgaacccgatagatttcatccaaggttaatgatcgctctgctgggaatatatgtcggcgaatttgatggtcggcctcccgcagctttctggcggagatatggtagctagcgcgcaactcgcataaaatatgaactagaagcctgatgcgctctgttgacggtcagtcacttaacagcacccaattagggacggtccttaccctccttgagaagatggtcaggttctcggtgcctcaccccgcaaggccaccagggcggcttattcgcctccgggtcaagctgctgagtgacccctgcgacaaccgtccgtccattgtacggaaaataaacctgcttgcggggctccaccagcttgatataggcttttgcgagggcccgacagttcgtctgctgcaggttttgaaatgccttctcatagtatctctgtagcaaatcacggtttctgatagatatggtgacttccggccgccacattttgttgagatcgctccagacatttctttttgtcggtttccagctctgtgtgtcccagggagacaaaggcgtatgagtggactctgctgttggcggaagtagaccagctggtgggaaatttcgtgtttggtgaggtgatgctgggacgtcataatgtgctagagcaatcgttatttgatcgtactcctgcgcaattgatatgaaacctacattgatctatcgccgagcagacttctcctgacttcgtgactgctttggtaagggcgtccgctaactgtgccgacagggatccctggaaggttttggcaacagaccgagagcactgtaagtgaagactgccctctacgtcaatggatatgagcgcaaagtgggaatgacccaagtcaccgtcaagcgatacaggggtgcggcaagtcattgagttatcggtgtcggcattcctagtagagataattaccacggataccacagaccgcagattttcagggtttcatttatagctgaatgtgacttggagatcgccctgagtaggcgcgataaaaagaatggaatagactgtttggactcgtcgacaacgatcttgcgtcgatgtaccccctgcattccattgacccctgtcagctgcgggacacttccaattggcctgtcaaataatgtgaactagctccgcactaaccatggaatagatagaagacgatggcttgtggggcaaacgagctaacaacggactaactgctgtgctaactgcacactcggaatgcaaagctggtctactaatatcaagacttgatgaggcggcttagggagaaccaagccttcggggagggaggggtagccacagccttgcctcaaaatggtcttcctcgtcacattctgtgtcaatattttagttggcgccaccctgacttaaccttcctcgtaccatcgatatcgtatagaaggctcacttttcggtaacaggagaatagaaaagaggcaagggagcaaattgcgccataccctgggcaaatcccgggcaaatcccgggaaagcaaacaacatggccgagccgcctagattatctgacgatccccatgcaagccatctcttcctatttgcggatcatcgtctgtgatcgtcatttgtgtgaagtgaaaaggaaaacagacctatgtctgaggtattcaattgtttacatgtcctgtggagcaaatcatagactgagccctcgtcttctccatcctgcgggacagttgtctattctgataaggacccattctgaccgcacaaaccttgttcatctttcatcctgataaatcagctctataatagagtttggttggtagctgccaacttattctgtcaactgcatgcatagtctgtctgtaacctagtttcttcgaccactcagcattctcaccacacattgcacatgcacctctacatatctgacctctctccatagactcagtcgcgtatttaattagtatgctacgtgtgccccgttctagaccatacgctaatcaatttatggctacggcgcagacaaaactttgcgaaccaaagcatgatttacgtattgttggttcaacagcgcctatgcctagttatggttactgctatgaacttagcgagtcccacatccactttagtggcatggcccaagcgctctccgaagtgctcatgcgcgtacgcctcaagactgcgttggactccgacttgcaggacagaaccgccaagtgcgcctacctcgcctccacattcagggggaaggtcctcaattggttttcacccgcttactggacgtcatattggaactgtccacgaactaatggcttctccatcactataactataagattctttaacgattagaagaggttcgcaaggcgcttgcctaagcccggattaccggggatatcggaatttgccccggctacgcactagcgaccaaatatctttctcagggtacgaccaaacgatgcacggacccaaagaattcacttttacttcttgccagtacggcgtatcgggtagtgcggatagtaggagcttctcaatgcctttggctagtctccacaatcctgaagttgctataccgagtatgaccgtgctgcggcagatcccgacagtttcgatcaccgcctaaagattggccaggcttctctaactttggcccccacgctggagccgtttatcgtcggtcgtactacggagattggagtgggcgtacaaagctcggtaagcgtgtgactcgccgtggagccataggccctagacagatctatagaccaaaaaggaagcagaaacccaaagaaggtccatttatccattgtagatcaacaattgggaagagggccgatttacgctggcctgcagcggtgggtgttggtgagccagtcaggccaaaaacggtcttgccacttgatctcagacatcccgagcttctctaataaatgaagttccgcggcacagcttttgcatcagccgcaagcatttccccattaaatgcgatctatgtcattctggctaatattgctccaactttctccgggtgttcactcgttggatcaaggtttcttcatacagtgagcttatgttctgatgacagctgatgcctttaaaaagcatgaagcctatacgaaacttacatcaccccataatcactgtagccattccagttgctttaggtggaattttcccctttgggtgtatcggtgggttgggtcgttggagaagatttttcagtcgactgagctcgcgattggatgtaaagcagcaggccaaggctgcaatacccgcaatcaggggttctaagaaaacatccatccgaactttgagctgatcttcagtttggagagcctggaggtgacggacccgatatgccttgctcgttccattctgcatacacacatgtacctttctttcctttataagggcttgtgacgtcaacccaacagcaaaaccggcttttgaaggcgaagatctcccgaagatagtgagaccagaaggaggctgagtatctaccaataagctcaacctccttcttttccgagcggggcctatcggtcaaaattgggggtaatgtccaatagggatgtaggagaatagtggagcagagagcccgatgttcatgggctctacgcactaagtctttaggcgtataaatctactatccattgaaacggtaagtcgcaagctgaaagtggccgcctaatatctggtatgttgagacccatatacatcggatattagttcaactcagggttagtatgcggtcgggtgcctcagttcctccgtgagccgagagttgacccgcttggagactggcaggtcgagatgggagacaatgacatcaactttgactgccacttctttgggtttacccagctctacatgccgggtggcaacgagccagtggttgcggagtacggactgtgccttatctacatctagtagattaatgctaactgttgtgatatgaggctggtgcatatcaggaacaaagccgcaccatcggaattaattcccgaggtgttatatgaagtaagtcgattggaaaccaacttggagcgcatgctgtatatatagcctcacctatcccctctggaagaataattaagattatacctctgaattacaacagtatcgcctgtagcggacctggacggactgcgggtatcctcagattcggaggacgacaaggacaatgcagggtacaatctgcttcgaaagtttggtcctcgaggagggcgcgagacttttacggattccgagcatgcctgtgtctgagttacgctgaggtaacgagtgttcccacttctggttgagtgtgataggagaaagcgctccggccttatagcaagttgtatcgcgggaccagaattgggtgttgtgcttgctcgcaatagggggtattgcaagcgcacgctttttttcacccatattttctgcacgtagatatatctatttcaaaaactgtaatttcggacaacggctcagtaagagtcggacgagaccaacataattcaacaaactggtgaaacaatgggatattgccaacaagttcaggctctcgtggctgtccaacgttgttgattctcaacgaaacacagtacattaaaagatggaggtttttggtctccagaaacttgagctggtgcgagtcgtgagagtctggtactagttcaccaagctgagccatggctcataaacgcaatcgccatttttatgtacaacactatgatcttttaaactcaacaactcttcatcttcgtattcactttctgctgttttcttcacacgtccataccacctctgttaattgcccgagcatcaccatgtccccacgtaacgcatgcggctggccagaatgggaggagaaaagcctcctctcttggctgtatgcccaccgggacctgtcgtggaaagccctctccgacgcttattatgaagaataccaggtggatcgaagcgttgagtctttacgggagaaaaagtaccatattctgcggaagcagcgttgcactggcgccaaagtttccggacgttcaggaaaacaaaagcccccaggcggcatgcggcgctcgctggtcaatagcgattcacgatcacccctgccagacaataactctgcccaaaggaacattgacaaatggtttcaaaaagttctagcggccgaccctagccagtctggggtcagcgataaaccagctcaaacgacacgctcagaaaaatgtacgaaatacttccattcttcctatactagaggctgacattttgccacaggccgcgtggtgccagcaccgcttccgtacccgcctaaaagaacacgatcgtcatcctggatgtgggactatgtacatcttgtctgtgccgccaggaaactgagatacccgcggacagaacgtccacactagctgcatgttatcagctggagcgctacattgctatgtcgaaggaactgtggccaaccatttcgataaagtagtcctggtgtatgtcatcaccataaaggctgtgattactcgacaatagatcctcagcgtgagagatatgaatcactccatggatttcgtagagcaaggaacaatcacccttattttggattacaacaatagtgaggaagttccaaggtcaaaggtgaacattcgagcatgacctgtggtgcctctgagcaggcccggctacgcagtttcatccttgtcattctaaatcagggccatggcccatgtggcctgcaaaatactgcggacaatgtataaggatccacggtactatgagcgttcccatagagagataggacagggtagcaagactaaaaacatatgggttcttgttagcccaaggaaacatgtccgattggatttaattggatcggtggtcgagagcggagtgatctttggagtgaagcgtccgatctgctttcgacccacgcccaagtcacaaggaaatttaagtttgacaccgactgcggaaccacgagcaggactgccgatcagtagcggaaccgcaaatcatttcgagagctcttttggataaccatggaaatacctgctcggtgagagaatacggttgtgatcaagcattcaagtctgggattttgctgctcgtgattaagcgttgaagcccaaaagaaaagagaactagaacagaatcaccacaatccccgtcggctggtatgtaggataaatttactgcggtaaggccaatattttattagagagtttctctaaattcagcatcacgatcaagatgtgcagattgattgaaataaagtttagggccgcaggagggccggtccacattgaaatcttgtccgggggccaatcggtattattaaaacggaggcattttatttgagcccatgtggtttgtccataattggcatagttctttacaagccgcctgctagtgttattgaaatagcggtagacttggagagatggagagggagtgttgttatggcccaaagagagcaataatcatcggcttattgcaggagaagatacatagcttctagaacgttctacagaccagataggcaaagttcagcttgccacttggcaggggaacttactttcccatgactgcgaccaagagaacacaaccacggatcgggttgtagcctaccattatgtcgccaaagtctgcgtgttattccaaatatcggctttaccgcaggataggccctttgaggtatcgagaaacgatgccaggtagaacgtcgatagctatatatcggactattggtatattcgtgagtgctgtctgttgtgatacgaggccggtacagaccaggtatcaagccgcacgtattcgatgatttgccgctgattggtgaaagaaaacacggcccaagcccactattgttcgaacgcctcgcgactatatttctgcgacctctgctcagtcagttggcagagatatcccggtcttctgcgccccagttcgtcaggaccaaaaatgggaagctctggcgaatcatttgaacaataatcgtcgcatggtctcgtagtaatacaaaccgtttcgtgcttagttagttcactttggtgcacagtgggatccgtggcgcacgtcaagaaataccgatctcaatacggtggttaaagcaatggaacctgttcaatatagaagccggggtatgacatctcactacatacaacggggagaatcgaaaccattgtcaccattttatttctttgattgttttctcaaactctcagtctagtcacgccaggcctaatgtagttagtcgatgatgtactgctcatcgccctttcctattcggcagcccgaattggtctaggccagaagtagattggaggcgacgacccaaagaggacagtaggaaggctagtttggagaggacaagtaaatttctgttggttgtaatacttgtcttgtttcctacagccatattgagagcagatcataattctagtaaatttgagaagttccagtattgagaggctctattcggtatatgcaaaggcctaacctatctacgggctgtgatcggctggttatggccaccgattgatattgacctcaacttgcgctcttcttattgagtcttccaaccaggggatcgagcgagggataatggctcatcttctacgacacattgcaaccgtcaccctgtgtccagttccccgatgctacctacgcctaacgtgcatccggcgatgtcggtggagtcgaccgtgtttcgcgcttggatcaagagaaactgtaacatgacataagtactgtaaatggaacgcttcaaaaggggttataatacttactgattgggtcactagaaaggcgatggcttcgcctcacgctgtgagtgggtagcgagccaggtgtctgtgttgcagagaattgtcagcgcaagtcttcgtgatatcgtaatatatgggcagtgtgtgctactggctctggtgggaacatgattgcctttaatggcctggaagcctggtggattattagcatatctcggactcggacggcgaaagaaagagtcataccactggaatggtaaccagtaggacgcccagaatgaagacccccagtgcgatcatctataatattttttagaaacgctatatgcatcgtgaaggggaatgagggaaatagttcgatgttatatacctgacttttgtaggcagtcttgcaatacaaattgtggttttggggatatatataacatgagggagagagctaccgacccctgttgaagtcacaatctaaactcgttggcccgcagcaatttgatgctatcgcctactcagaaacatgagggatttttgaattcatcctacccacttaaacggtaccccaacctcagccaaccaggttctcacatttagcaatgatatatatttaggggaattcagcagctcacaggctacgtatcgcttcgttagtttagatcattatttataaagcccccaaagggctaaaattcacaacttagtcacctctatggtcccgaaagatttgctacatgagggtatgttttgtcaccgaatttgacaaccggcgtgcttactaattagctaaccacttcggacaggggtgatggaaagcataatctcgctacctggattttgggctcgctactttcccttttgcgctcaacaccagatcctgcaagccatacagcgacaactcgaaacccatgccttctg

SEQ ID NO: 106 - DNA, 6117 bp, Penicillium marneffei
atgtctactggccattacgacgatggctacggccatcaaggccacggtgatgcctattaccaggacgatcaacatgggtactacgatcaaaacgagtactcgaactacggagacggttactatgaccagagtggtcattatggcgataaccacggcgaacatcacggtgaacattacggtgaacaacacgcgggcggcggctattatgaaggtggtcaagacaactactacaacgagcagtactatgatcagggccatggcggacatcctgattactctcaaaacggccgcggccgtcgacgtggagactctgaagaggattcggagagtttcagtgatttcaccatgagatccgaaactgctcgtgcagctgatatggactactacggccgtggcgatgaacgttacaacagctacaatgaaagtcagatgggaggccaaggatacggataccgaccaccatcctctcagatctcatacggaggaaaccgctcttcaggcgcgtcgaccccagtttatggcatggactacaacaacgctctcccggctggccaacgctctcgcgagccatacccagcctggacttcggatgctcaaatccccctttccaaggaagaaattgaggacatcttcttggacctagtcaacaaatttgggttccaacgtgacagcatgaggaacatgtatgaccatttcatgactctcctcgattcccgtgcgtctcgtatgaccccaaaccaggccctcctctcgctgcatgccgactatattggtggtgacaatgccaactaccgccgttggtactttgctgctcatctcgacctcgacgacgccgtgggattcgccaacatgcaacttggaaaagccaatcgtagaactcgaaaggcccgtaaagccgctaagaaggctgctgcccaaaaccccgagaatgagcaagctacgcttgacgcattggaaggcgacaacagcttggaagctgctgaattccgctggaagactcgcatgaaccggatgtctcaacatgaacgttgccgacagatcgccctattccttctctgctggggtgaggcgaaccaagtccgattcacacctgagtgtctgtgctttatcttcaagtgtgccgatgactacttgaactcccctgcttgccagaaccgtgttgagcctgtggaagagggcacctatctcaacaatgtcatcactcctctgtacagctatctacgtgatcagggttatgagatttacgatggtaaatatgttcgtcgtgagcgtgaccacgcccagatcattggatacgatgatgtcaatcaactcttttggtaccccgagggtatcgaacggatcatccttgaggacaagacgcgcattgtggatataccccctgcagagcgatgggaaaagctcaaggatgtcaactggaagaaggtgtttttcaagacctatcgcgagactcgatcctggttccatctgattaccaacttcaaccgtatttgggttattcacctgggtgctttctggtttttcacggcctacaatgcgaaatcattatacaccaaggactatcagcaacaactcaataaccaacctcctggttcttactcatggtcagcggtgggtctaggtggcgcactcgtcactcttatcaacattttcgcgactcttgccgagtgggcatatgtaccacgcagatgggctggtgcacagcacttgaccagacgtcttttgttcttgctcgccgtcttcgccgtcaatgtcggacctgctgtatatgttttcggtatatcaaaagacggcacagattctatcgcactggctctcggtatcgttcagttcttcatcgctttggccagtttctttttcttctccgtcatgccacttggtggtttgtttggcagctacatgaagaagaacacacgtcagtacgttgctagccagacattcacagccagctttcctcaactcagtggaaatggtatgtggatgtcttacggtatgtgggtttgcgtgttcgccgccaaattggttgaatcctacttcttcctcacgctctctttcaaggatcccattcgtattctccgcccaatgaagatccaaaactgtctgggtgacaaaatcattggtgatattctatgccacgcgcaaccccaaattcttcttgggttgatgttcttcaccgatttgaccctcttcttcctggatagttatctgtggtacatcattttgaacacaatcttctcagtggcacgctccttccacctgggtgtttctatttggagtccctggcgaaacatcttctcacgtttgcctaagcgtatctactccaaggttctggctaccacagatatggaaatcaaatacaagcccaaggttttgatctcccaagtctggaacgctatcgtcatttctatgtaccgtgagcatctcctggctatcgaccacgtgcagaaacttctctaccatcaagttccttctgagcaggaaggcaagcgaacattaagagcccccaccttctttgtctctcaggaggatcactcgttccgcacagagttcttccccactcaaagtgaagccgagcgtcgtatttcgttctttgctcagtctctttccaccccgattccggagcctctacctgtcgacaacatgcccactttcactgtcttgattcctcactacagcgaaaagatccttctttcacttcgtgagatcatcagagaggatgaaccttactcccgtgttacccttttggaatacttgaagcagcttcatcctcacgaatgggactgctttgttaaggataccaagattctcgcagatgagacatcccagttcaacggcgagtatgagaaatcagaaaaggatgctgcgcgaagcaagattgatgaccttcccttctactgcattggtttcaaatccgctgctccagaatataccctccgtactcgtatttgggcctctctccgcactcaaactctttatcgtacaatctctggtttcatgaattacagccgtgcaatcaaacttctctatcgggttgagaaccccgaggttgtgcaaatgtttggcggtaactccgacaagttggaacgtgaattggaaagaatggcgcgccgcaagttcaaaatttgtgtctctatgcaacgttatgccaagttcaacaaggaagagcgtgaaaacacagaattcctcctccgtgcttacccggacctccaaatagcttaccttgatgaagaacctcctgccaacgagggcgaggaacccagactgtactctgctctcattgatggacactcggagatcttggagaatggccttcgcaagcccaagttccgcattcagctctccggcaaccccattcttggagatggaaagtccgataaccagaaccactccatcattttctatcgtggtgaatacattcaattgatcgatgccaaccaggataactatctcgaggaatgtttgaagatccgtagtgtccttgccgagtttgaggaattgaccactgacaacgtttccccgtacactcctggtgtttctacccccaaaaccgacccggtcgctattcttggtgctcgtgaatacattttctctgagaatattggtatccttggtgatgtcgctgctggaaaagaacagactttcggtaccctattcgcccgtactcttgctgaaattggtggcaaacttcactatggtcatcctgatttcctgaacggcattttcatgactactcgtggtggtgtctccaaggcccagaagggtcttcatctgaacgaggatatttacgccggtatgaatgccgttctccgtggtggaagaattaagcactgtgaatacttccaatgcggaaagggtcgtgatcaaggttttggttctattctcaacttcacaaccaagatcggaactggtatgggtgaacaaatgctgtcccgtgaatactactacctcggcacccaacttccattggatcgtttcttgtcgttctactatgctcaccctggtttccatgtcaataacatgttcatcatgttgtctgtgaacatgttcatgatcacaatgatcaacctcggtgccctacgacacgaaaccattctctgccgattcaactccaatcttcctatcacggatcccttgatgcccaccggttgcgccaacctcgtacctatcactaactgggtcaaccgttgcattgtgtctatcttcatcgtgttcttcatttctttcgttcctctagtggttcaagaattgactgagcgaggtgtttggcgcgcggcaacccgtcttgctaagcaatttggttctctttccttcatgttcgaggtgttcgtttgccaaatctatgccaacgccattcagcaagatctttcgtacggaggtgccagatatatcggtactggtcgtggtttcgcaactgctcgtatccccttcggtgttctttactctcgcttcgctggaccctcaatctacctcggcgctcgatgcttgctcatgttacttttcgctacggcgaccatgtggactgccgctttgatttggttctgggtttccttgatggctctatgtatttccccattcttgttcaaccctcaccagttctcgtggaacgacttcttcatcgactatcgcgactatctccgatggctgtctcgtggcaactccagatcccacaactcttcatggattgctttctgtcgtctgtctcgtaccagaatcactggatacaagcgcaaggtcctcggtgttccatcagagaaattgtcgggtgacgtgccgcgtgctcgtatcaccaacatcttcttttccgagatccttggtcctttggtcttggttgcagtcacactcgttccttatctctacataaacgctcgtactggtgttactgacaacaacccagtggcgaccaatgcgcttctccgtattggtatcgtggctttcgctcccatcggtgtcaatgctggtgttgcgggcgccatgttcggcatggcatgctgcatgggtcctctcctgagtatgtgttgcaagaagttcggttctgtacttgctgccatcgcccacggtatcgccgtcattatgctccttgctattttcgaagtcatgttcttcttggaaggttggagtttcccccgttgtgttttgggcatgatctccatggcagccatccagcgctttgtctacaaattgatcattgctcttgcattgaccagagaattcaaacatgaccaatccaacatcgcttggtggactggaaaatggtacaacatgggttggcactctctctcccagccgggtcgagaattcctctgtaagattactgagctcggttattttgccggcgactttgttttgggtcacctcctcctcttctgcatgctccccgctctatgcgtgccatacatcgacagattccactctgtcattcttttctggcttcgtcctagccgacaaattcgtcctcctatctattcgttgaagcagtccaagctccgccgccgtcgcgtgattcgttacgccatcctttacttcgtcatgcttgtgctctttgttgtcctcgtcgtggcgcctttggtcgttcgtcgtctcaacatcaaactgccctcaattccggacaaccttatgcaaccgttggatgccggcgaggcccataacgacactcacacctactataccggctctggactacccgccggattcgtcgcatattccggtggtgacaccggcagcaagagcaccagcactgctggcgcgaagatgatgtttatgttctagactgcatactgactctgttctctatcttttattcttttttcatctttcaagctgtacaaatgcctgaagattcagggctcagttacagcattatttccttgcaacatccgccctcgctgcatttatcatcatttttattgctagtaacgagtaattccatcttctgtgttacttttactgtatacgtctatggagttgattggttgttttgtcgcacacctacatgtcttacaaaccttttgctttcgtctgtcgtttctgatgcgaatatgctttctttcagacctatcaacacactatctgcccatagcctttctgtatcatcaatgcaattcctggttctattcaact

SEQ ID NO: 107 - DNA, 5637 bp, Pichia pastoris
atgtcctacaacgacgacaaatattacaatcaaggttacccttctgagggctatcatccatccgaagaagcccttcaatctcagggatactatgaccaaggccaaggtcaacaacctcatggattgaaccaaggcggcctccccccacatgaatattatcaaagctacgaccagcagttcgatggctaccaccaagagtacacatctgatcccaacttggttggtcatcaaggctactacgaacaaccccccagaactgctcaggacccagaggctttctcagattttagctatggacctggaaatggcgctggaactccatatgatggatatggggcccaatacactccttctcaaatttcttatggtgatccgagatcctccaacacgtccactcccgtgtatggtgcaggtccatacgatcagtctggaatggtagccttgcctaccgacccctatcctgcttggaccgctgacaatcaagcccctgtctccattgaacagattgaggatgtcttcattgatttaacgaataagttcggttttcaaagagattctatgagaaacatgttcgactattttatggttttattggactctagatcttccagaatgtctcctgctcaggcacttttgtctttacatgcagactacattggcggtgatcatgcaaactacaaaaaatggtacttcgctgcccaattggacttggacgatgaagttggattcagaaacatgaacctcggaaagctttccagaaaggctagaaaagccaaaaagaagtcgaagaaggccagaaaagttgtcgaagagcacgccgatgacactgagcgcaccttaaccgaactggaaggtgacagctctttggaagctgctgattatagatggaatgctagaatgaacgcatatgttcctctcgacagggttagacacatcgcactttacttacttctatggggtgaagctaaccaagtcagatttactcctgaatgtttgtgtttcatctacaagtgtgcttccgattatcttgagtctgacgcatgtcagcagcgggtcgaacctgttccagaaggcgattacctcaaccgaattatcacacctttgtacagatttatcagatcgcaagtatacgaagttgacaacggtcgttatgtgaaacgtgaaaaagatcacaataaagttgtcggctacgatgatgttaatcagcttttctggtacccagaaggtatcgctaagattgtttttgaagatggttctcggttagtcgatgttccttctgaagaaagatatatcagattgggagaagtcctttgggaaaacgtttttttcaagacttacaaggaaattcgttcctggttgcattttattaccaatttcaatcgtatctggatcatccatgtttctcttttttggatgtatgctgcctacaattcacccactttatacaccaaacattatattcaaacccagaacaatcaacccttagcttcttctcgttgggctgcagcagccttgggaggtacagttgcttgtgctattcaaattgccgcaactatctgtgaatggctatttgtaccaagaaaatgggctggagctcagcatctgtctagaagacttattttcctgactttgattttagcctgtaacttagctccggttgtatttgtgtttgcttgggctggtttggagacctattctcaggctgcctacattgtttccattgttgtattctttgttgccgttgctacaattgtgttcttctcggtgatgccactaggtggtctttttacttcttacatgaataagagatcgagaagatatgtggcttcgcagacttttactgcctcatttgctcaactgaaaggtctagacatgtggatgtcttaccttctttgggttgttgttttcaccgccaagacccttgaatcctacttcttcctgatcttgtctctaagagacccaatcagaaatttatccatcatgacaatgaaccgttgtgttggtgaaaggtggtttggagacacgttatgtcgtgagcaagctagaatcgttttgggattgatgtacgttacagatttattcttgttctttttggatacttacatgtggtacattttgtgtaactgtgttttttctgtgggacgatccttttacttgggtatctccattttgactccttggaggaacatttttaccagattgccaaagagaatatactcaaaggttttggctactactgatatggaaatcaagtataaaccaaaggttttgatttctcaagtttggaacgctattgtcatttccatgtacagagagcacctccttgccatcgatcatgtccaaaagctattgtaccatcaggtgccatctgaaattgaaggaaagaggacattaagagctccaactttctttgtttctcaagatgacaataactttgacactgaatttttcccaagagattctgaagctgaacgtagaatatcattctttgctcaatctttggccactccaattccagaacctcttcctgttgataacatgcccacgtttactgttttcacacctcactactccgagaagattcttttgtctttgcgtgaaattattcgtgaagatgatcagttttctcgtgttaccttactggaatatttgaaacagctacacccaatagaatgggactgctttgtcaaagataccaaaatccttgctgaagagacttctggttttgacaatgacaaccaagaaaagaatggaaacaacctgaaatctcaaattgatgacttgccattttattgtattggtttcaagtctgctgcgccagagtacactttaagaacaagaatttgggcttctttgagatcgcaaactttgtaccgtactgtttctggtttcatgaactatgcacgtgctatcaagctcttgtatcgtgttgagaatccagaaattgtacagatgtttggatctaatgccgaaaaccttgaaaaggaacttgaaagaatggcccgacgaaaattcaaatttgttgtggctatgcaaagattgtctaagttcaaacctgaggaattagaaaacgctgagttcttgctgagggcttaccctgaccttcaaattgcttacctggacgaagaacctcctcttaacgagggcgaggagcctaggttatactcggctttgattgatggacattgtgaaattatggagaatggtagaagaagacctaaatttagagttcagctctctggtaacccaattttgggtgatggtaaatctgacaaccaaaatcattctatcatctttactcgtggtgagtacattcagttgattgatgcgaaccaggataactatttggaagaatgtttgaagattagatctgttttggctgagtttgaggaactgaacatcgaccatgttaacccttatactcctggtttgaaatctgaatttgacggtgttaaacaccctgtagccattgtgggtgccagagaatacatcttctctgttaactccggagttctgggtgacgttgctgcaggtaaggaacaaacctttggtaccctgtttgctcgtactctggcccagattggtggtaagctgcattatggacatcccgattttttgaataacatatacatgactactcgtggtggtgtttctaaggcacagaagggactacatttgaatgaggatatttatgctggtatgaccgccatgtgtcgtggtggtagaatcaagcattgtgagtactaccagtgtggtaaaggtagagatcttggttttggctcgattttgaatttcacaaccaagattggtgccggtatgggtgagcaaatgctttcccgagagtattactacctaggtacacaattgccactggaccgtttcctttcattctactacgcccatcctggtttccatattaacaatttatttattcagttgtcgcttcagatgtttatgttgactttagtcaacctgaactctttggcccacgagtcaattatctgtcagtacaacagaaatatacccattacggatattatgtatcctgttggatgttataacctcatgcctaccattgactggattagacgttatacgttgtccattttcatcgttttcttcatttctttcattccactagctgtccaagaattgattgaaaggggaatgtggaaggctgctcagagattctgtcgtcatttcatttctttgtctccaatgttcgaagtttttgttgctcagatctattcgtcatctcttgtgaacgatttgaccgttggtggtgctcgttacatctccactggtcgtggctttgcaaccgcacgtatccccttctctgtgctttactcacgttttgctgactcgtcaatttacatgggagctaggtccatgctgctgttactgttcggtactgtcgctcactggcaaccagcattattgtggttctgggcatcattgtcggctttgatgttctctccattcatcttcaacccccaccaatttgcttggcaagattactttattgactaccgtgacttcataagatggttgtctcgtggtaacaccagatggcaccgtaactcctggatcggttatgtacgtctttccagatctagaatcaccggtttcaagaggaagaccattaacgacgagtctgaaaaggctgctggagatgcagccagagctcatcgttccaacattcttgttgccgatttcattccttccgctatttacactgctggttgctttacagcttacacattcatgaacgctcagaatggtgttgctaatgctactgttgtgaactctgtattgcgtattgtcattgtctcaattgctccaattgtggtcgatctggccgtgttaggattctgtgctggtttagcttgttgtgccggtcctatgttgggtctgtgttgcaagaagactggtgctgtgatggctggtgtagctcacggtattgctgtcgtcattcacatcattgctttcattggtctatgggtgttagagggattcaacttcactaaaacactgatgggtctcgcagcaatgatttatattcaacgtctgattttcaagttaatgactttgaccatgttgactagagaatttaagaatgatcattcgaacacttcattctggactggtaaatggtacggttctggactaggctggatggcctggacccaaccagcccgtgagtttgctgcaaaagttatagagatgtctgaatttgctggtgacttcgttttaggacatattctcttgttctgtcagttccctctactgtgtgtccctctgattgacaggtggcactcaatgatgttgttctggttgaagcctagtcgtcaaatcagaccaccaatctactcgttgaagcaagctcgtcttagaaagagaatggtgagaaactacctgaccctctacttcttggtatttgccatctttgttgctatcattgcaggtcctgcagctgcagctggtcaagtgaatgtcgaggaactaactgaacatttaccagagtttgctgaaggtttgattcaaccaagacgccaggacaataacgatacaggaaacaacaacacctggggatggacttatacaccatcaacatcttcctggtctaccaaggcttaa
